(19) United States
(12) Patent Application Publication
(10) Pub. No.: US 2002/0062014 A1
(43) Pub. Date: May 23, 2002

(54) Expressed sequences of arabidopsis thaliana

(76) Inventors: Jorn Gorlach, Durham, NC (US); Yong-Qiang An, San Diego, CA (US); Carol M. Hamilton, Apex, NC (US); Jennifer L. Price, Raleigh, NC (US); Tracy M. Raines, Durham, NC (US); Yang Yu, Martinsville, NJ (US); Joshua G. Rameaka, Durham, NC (US); Amy Page, Durham, NC (US); Abraham V. Mathew, Cary, NC (US); Brooke L. Ledford, Holly Springs, NC (US); Jeffrey P. Woessner, Hillsborough, NC (US); William David Haas, Durham, NC (US); Carlos A. Garcia, Carrboro, NC (US); Maja Kricker, Pittsboro, NC (US); Ted Slater, Apex, NC (US); Keith R. Davis, Durham, NC (US); Keith Allen, Cary, NC (US); Neil Hoffman, Chapel Hill, NC (US); Patrick Hurban, Raleigh, NC (US)

Correspondence Address: PARADIGM GENETICS, INC, 104 ALEXANDER DRIVE, BUILDING 2, P O BOX 14528, RTP, NC, 277094528

(21) Appl. No.: 09/770,791

(22) Filed: Jan. 26, 2001

Related U.S. Application Data
(60) Provisional application No. 60/178,480, filed on Jan. 27, 2000.

(51) Int. Cl. C07H 21/02; C07H 21/04

(52) U.S. Cl. 536/23.1

(57) ABSTRACT

Isolated nucleotide compositions and sequences are provided for Arabidopsis thaliana genes. The nucleic acid compositions find use in identifying homologous or related genes; in producing compositions that modulate the expression or function of its encoded protein, mapping functional regions of the protein; and in studying associated physiological pathways. The genetic sequences may also be used for the genetic manipulation of cells, particularly of plant cells. The encoded gene products and modified organisms are useful for screening of biologically active agents, e.g. fungicides, insecticides, etc.; for elucidating biochemical pathways; and the like.

### CROSS-REFERENCE TO RELATED APPLICATION

[0001] This application claims the benefit of U.S. Provisional Application No. 60/178,480 Filed Jan. 27, 2000.

### FIELD OF INVENTION

[0002] The invention is in the field of polynucleotide sequences of a plant, particularly sequences expressed in arabidopsis thaliana.

### BACKGROUND OF THE INVENTION

[0003] Plants and plant products have vast commercial importance in a wide variety of areas including food crops for human and animal consumption, flavor enhancers for food, and production of specialty chemicals for use in products such as medicaments and fragrances. In considering food crops for humans and livestock, genes such as those involved in a plant's resistance to insects, plant viruses, and fungi; genes involved in pollination; and genes whose products enhance the nutritional value of the food, are of major importance. A number of such genes have been described, see, for example, McCaskill and Croteau (1999) Nature Biotechnol. 17:31-36.

[0004] Despite recent advances in methods for identification, cloning, and characterization of genes, much remains to be learned about plant physiology in general, including how plants produce many of the above-mentioned products; mechanisms for resistance to herbicides, insects, plant viruses, fungi; elucidation of genes involved in specific biosynthetic pathways; and genes involved in environmental tolerance, e.g., salt tolerance, drought tolerance, or tolerance to anaerobic conditions.

[0005] Arabidopsis thaliana is a model system for genetic, molecular and biochemical studies of higher plants. Features of this plant that make it a model system for genetic and molecular biology research include a small genome size, organized into five chromosomes and containing an estimated 20,000 genes, a rapid life cycle, prolific seed production and, since it is small, it can easily be cultivation in limited space. A. thaliana is a member of the mustard family (Brassicaceae) with a broad natural distribution throughout Europe, Asia, and North America. Many different ecotypes have been collected from natural populations and are available for experimental analysis. The entire life cycle, including seed germination, formation of a rosette plant, bolting of the main stem, flowering, and maturation of the first seeds, is completed in 6 weeks. A large number of mutant lines are available that affect nearly all aspects of its growth. These features greatly facilitate the isolation of fundamentally interesting and potentially important genes for agronomic development

[0006] Most gene products from higher plants exhibit adequate sequence similarity to deduced amino acid sequences of other plant genes to permit assignment of probable gene function, if it is known, in any higher plant. It is likely that there will be very few protein-encoding angiosperm genes that do not have orthologs or paralogs in Arabidopsis. The developmental diversity of higher plants may be largely due to changes in the cis-regulatory sequences of transcriptional regulators and not in coding sequences.

[0007] Many advances reported over the past few years offer clear evidence that this plant is not only a very important model species for basic research, but also extremely valuable for applied plant scientists and plant breeders. Knowledge gained from Arabidopsis can be used directly to develop desired traits in plants of other species.

### Relevant Literature

[0008] Cold Spring Harbor Monograph 27 (1994) E. M. Meyerowitz and C. R. Somerville, eds. (CSH Laboratory Press). Annual Plant Reviews, Vol. 1: Arabidopsis (1998) M. Anderson and J. A. Roberts, eds. (CRC Press). Methods in Molecular Biology: Arabidopsis Protocols, Vol. 82 (1997) J. M. Martinez-Zapater and J. Salinas, eds. (CRC Press).

[0009] Mayer et al (1999) Nature 402(6763):769-77; “Sequence and analysis of chromosome 4 of the plant Arabidopsis thaliana”. Lin et al. (1999) 402(6763):761-8, “Sequence and analysis of chromosome 2 of the plant Arabidopsis thaliana”. Meinke et al. (1998) Science 282:662-682, “Arabidopsis thaliana: a model plant for genome analysis”. Somerville and Somerville (1999) Science 285:380-383, “Plant functional genomics”. Mozo et al. (1999) Nat. Genet. 22:271-275, “A complete BAC-based physical map of the Arabidopsis thaliana genome”.

### SUMMARY OF THE INVENTION

[0010] Novel nucleic acid sequences of Arabidopsis thaliana, their encoded polypeptides and variants thereof, genes corresponding to these nucleic acids, and proteins expressed by the genes, are provided.

[0011] The invention also provides diagnostic, prophylactic and therapeutic agents employing such novel nucleic acids, their corresponding genes or gene products, including expression constructs, probes, antisense constructs, and the like. The genetic sequences may also be used for the genetic manipulation of plant cells, particularly dicotyledonous plants. The encoded gene products and modified organisms are useful for introducing or improving disease resistance and stress tolerance into plants; screening of biologically active agents, e.g. fungicides, etc.; for elucidating biochemical pathways; and the like.

[0012] In one embodiment of the invention, a nucleic acid is provided that comprises a start codon; an optional intervening sequence; a coding sequence capable of hybridizing under stringent conditions as set forth in SEQ ID NO:1 to 999; and an optional terminal sequence, wherein at least one of said optional sequences is present. Such a nucleic acid may correspond to naturally occurring Arabidopsis expressed sequences.

### DETAILED DESCRIPTION OF THE INVENTION

[0013] Novel nucleic acid sequences from Arabidopsis thaliana, their encoded polypeptides and variants thereof, genes corresponding to these nucleic acids and proteins expressed by the genes are provided. The invention also provides agents employing such novel nucleic acids, their corresponding genes or gene products, including expression constructs, probes, antisense constructs, and the like. The nucleotide sequences are provided in the attached SEQLIST.

[0014] Sequences include, but are not limited to, sequences that encode resistance proteins; sequences that encode tolerance factors; sequences encoding proteins or other factors that are involved, directly or indirectly in biochemical pathways such as metabolic or biosynthetic pathways, sequences involved in signal transduction, sequences involved in the regulation of gene expression, structural genes, and the like. Biosynthetic pathways of interest include, but are not limited to, biosynthetic pathways whose product (which may be an end product or an intermediate) is of commercial, nutritional, or medicinal value.

[0015] The sequences may be used in screening assays of various plant strains to determine the strains that are best capable of withstanding a particular disease or environmental stress. Sequences encoding activators and resistance proteins may be introduced into plants that are deficient in these sequences. Alternatively, the sequences may be introduced under the control of promoters that are convenient for induction of expression. The protein products may be used in screening programs for insecticides, fungicides and antibiotics to determine agents that mimic or enhance the resistance proteins. Such agents may be used in improved methods of treating crops to prevent or treat disease. The protein products may also be used in screening programs to identify agents which mimic or enhance the action of tolerance factors. Such agents may be used in improved methods of treating crops to enhance their tolerance to environmental stresses.

[0016] Still other embodiments of the invention provide methods for enhancing or inhibiting production of a biosynthetic product in a plant by introducing a nucleic acid of the invention into a plant cell, where the nucleic acid comprises sequences encoding a factor which is involved, directly or indirectly in a biosynthetic pathway whose products are of commercial, nutritional, or medicinal value include any factor, usually a protein or peptide, which regulates such a biosynthetic pathway; which is an intermediate in such a biosynthetic pathway; or which in itself is a product that increases the nutritional value of a food product; or which is a medicinal product; or which is any product of commercial value.

[0017] Transgenic plants containing the antisense nucleic acids of the invention are useful for identifying other mediators that may induce expression of proteins of interest; for establishing the extent to which any specific insect and/or pathogen is responsible for damage of a particular plant; for identifying other mediators that may enhance or induce tolerance to environmental stress; for identifying factors involved in biosynthetic pathways of nutritional, commercial, or medicinal value; or for identifying products of nutritional, commercial, or medicinal value.

[0018] In still other embodiments, the invention provides transgenic plants constructed by introducing a subject nucleic acid of the invention into a plant cell, and growing the cell into a callus and then into a plant; or, alternatively by breeding a transgenic plant from the subject process with a second plant to form an F1 or higher hybrid. The subject transgenic plants and progeny are used as crops for their enhanced disease resistance, enhanced traits of interest, for example size or flavor of fruit, length of growth cycle, etc., or for screening programs, e.g. to determine more effective insecticides, etc; used as crops which exhibit enhanced tolerance environmental stress; or used to produce a factor.

[0019] Those skilled in the art will recognize the agricultural advantages inherent in plants constructed to have either increased or decreased expression of resistance proteins; or increased or decreased tolerance to environmental factors; or which produce or over-produce one or more factors involved in a biosynthetic pathway whose product is of commercial, nutritional, or medicinal value. For example, such plants may have increased resistance to attack by predators, insects, pathogens, microorganisms, herbivores, mechanical damage and the like; may be more tolerant to environmental stress, e.g. may be better able to withstand drought conditions, freezing, and the like; or may produce a product not normally made in the plant, or may produce a product in higher than normal amounts, where the product has commercial, nutritional, or medicinal value. Plants which may be useful include dicotyledons and monocotyledons. Representative examples of plants in which the provided sequences may be useful include tomato, potato, tobacco, cotton, soybean, alfalfa, rape, and the like. Monocotyledons, more particularly grasses (Poaceae family) of interest, include, without limitation, Avena sativa (oat); Avena strigosa (black oat); Elymus (wild rye); Hordeum sp. including Hordeum vulgare (barley); Oryza sp., including Oryza glaberrima (African rice); Oryza longistaminata (long-staminate rice); Pennisetum americanum (pearl millet); Sorghum sp. (sorghum); Triticum sp., including Triticum aestivum (common wheat); Triticum durum (durum wheat); Zea mays (corn); etc.

### Nucleic Acid Compositions

[0020] The following detailed description describes the nucleic acid compositions encompassed by the invention, methods for obtaining cDNA or genomic DNA encoding a full-length gene product, expression of these nucleic acids and genes; identification of structural motifs of the nucleic acids and genes; identification of the function of a gene product encoded by a gene corresponding to a nucleic acid of the invention; use of the provided nucleic acids as probes, in mapping, and in diagnosis; use of the corresponding polypeptides and other gene products to raise antibodies; use of the nucleic acids in genetic modification of plant and other species; and use of the nucleic acids, their encoded gene products, and modified organisms, for screening and diagnostic purposes.

[0021] The scope of the invention with respect to nucleic acid compositions includes, but is not necessarily limited to, nucleic acids having a sequence set forth in any one of SEQ ID NOS:1-999; nucleic acids that hybridize the provided sequences under stringent conditions; genes corresponding to the provided nucleic acids; variants of the provided nucleic acids and their corresponding genes, particularly those variants that retain a biological activity of the encoded gene product.

[0022] In one embodiment, the sequences of the invention provide a polypeptide coding sequence. The polypeptide coding sequence may correspond to a naturally expressed mRNA in Arabidopsis or other species, or may encode a fusion protein between one of the provided sequences and an exogenous protein coding sequence. The coding sequence is characterized by an ATG start codon, a lack of stop codons in-frame with the ATG, and a termination codon, that is, a continuous open frame is provided between the start and the stop codon. The sequence contained between the start and the stop codon will comprise a sequence capable of hybridizing under stringent conditions to a sequence set for in SEQ ID NO:1-999, and may comprise the sequence set forth in the Seqlist.

[0023] Other nucleic acid compositions contemplated by and within the scope of the present invention will be readily apparent to one of ordinary skill in the art when provided with the disclosure here.

[0024] The invention features nucleic acids that are derived from Arabidopsis thaliana. Novel nucleic acid compositions of the invention of particular interest comprise a sequence set forth in any one of SEQ ID NOS:1-999 or an identifying sequence thereof. An “identifying sequence” is a contiguous sequence of residues at least about 10 nt to about 20 nt in length, usually at least about 50 nt to about 100 nt in length, that uniquely identifies a nucleic acid sequence, e.g., exhibits less than 90%, usually less than about 80% to about 85% sequence identity to any contiguous nucleotide sequence of more than about 20 nt. Thus, the subject novel nucleic acid compositions include full length cDNAs or mRNAs that encompass an identifying sequence of contiguous nucleotides from any one of SEQ ID NOS:1-999.

[0025] The nucleic acids of the invention also include nucleic acids having sequence similarity or sequence identity. Nucleic acids having sequence similarity are detected by hybridization under low stringency conditions, for example, at 50° C. and 10XSSC (0.9 M NaCl/0.09 M sodium citrate) and remain bound when subjected to washing at 55° C. in 1XSSC. Sequence identity can be determined by hybridization under stringent conditions, for example, at 50° C or higher and 0.1XSSC (9 mM NaCl/0.9 mM sodium citrate). Hybridization methods and conditions are well known in the art, see U.S. Pat. No. 5,707,829. Nucleic acids that are substantially identical to the provided nucleic acid sequences, e.g. allelic variants, genetically altered versions of the gene, etc., bind to the provided nucleic acid sequences (SEQ ID NOS:1-999) under stringent hybridization conditions. By using probes, particularly labeled probes of DNA sequences, one can isolate homologous or related genes. The source of homologous genes can be any species, particularly grasses as previously described.

[0026] Preferably, hybridization is performed using at least 15 contiguous nucleotides of at least one of SEQ ID NOS:1-999. The probe will preferentially hybridize with a nucleic acid or mRNA comprising the complementary sequence, allowing the identification and retrieval of the nucleic acids of the biological material that uniquely hybridize to the selected probe. Probes of more than 15 nucleotides can be used, e.g. probes of from about 18 nucleotides up to the entire length of the provided nucleic acid sequences, but 15 nucleotides generally represents sufficient sequence for unique identification.

[0027] The nucleic acids of the invention also include naturally occurring variants of the nucleotide sequences, e.g. degenerate variants, allelic variants, etc. Variants of the nucleic acids of the invention are identified by hybridization of putative variants with nucleotide sequences disclosed herein, preferably by hybridization under stringent conditions For example, by using appropriate wash conditions, variants of the nucleic acids of the invention can be identified where the allelic variant exhibits at most about 25-30% base pair mismatches relative to the selected nucleic acid probe. In general, allelic variants contain 5-25% base pair mismatches, and can contain as little as even 2-5%, or 1-2% base pair mismatches, as well as a single base-pair mismatch.

[0028] The invention also encompasses homologs corresponding to the nucleic acids of SEQ ID NOS:1-999, where the source of homologous genes can be any related species, usually within the same genus or group. Homologs have substantial sequence similarity, e.g. at least 75% sequence identity, usually at least 90%, more usually at least 95% between nucleotide sequences. Sequence similarity is calculated based on a reference sequence, which may be a subset of a larger sequence, such as a conserved motif, coding region, flanking region, etc. A reference sequence will usually be at least about 18 contiguous nt long, more usually at least about 30 nt long, and may extend to the complete sequence that is being compared. Algorithms for sequence analysis are known in the art, such as BLAST, described in Altschul et al., J. Mol. Biol. (1990) 215:403-10.

[0029] In general, variants of the invention have a sequence identity greater than at least about 65%, preferably at least about 75%, more preferably at least about 85%, and can be greater than at least about 90% or more as determined by the Smith-Waterman homology search algorithm as implemented in MPSRCH program (Oxford Molecular). For the purposes of this invention, a preferred method of calculating percent identity is the Smith-Waterman algorithm, using the following. Global DNA sequence identity must be greater than 65% as determined by the Smith-Wateman homology search algorithm as implemented in MPSRCH program (Oxford Molecular) using an affine gap search with the following search parameters: gap open penalty, 12; and gap extention penalty, 1.

[0030] The subject nucleic acids can be cDNAs or genomic DNAs, as well as fragments thereof, particularly fragments that encode a biologically active gene product and/or are useful in the methods disclosed herein. The term “cDNA” as used herein is intended to include all nucleic acids that share the arrangement of sequence elements found in native mature mRNA species, where sequence elements are exons and 3′ and 5′ non-coding regions. Normally mRNA species have contiguous exons, with the introns, when present, being removed by nuclear RNA splicing, to create a continuous open reading frame encoding a polypeptide of the invention.

[0031] A genomic sequence of interest comprises the nucleic acid present between the initiation codon and the stop codon, as defined in the listed sequences, including all of the introns that are normally present in a native chromosome. It can further include the 3′ and 5′ untranslated regions found in the mature mRNA. It can further include specific transcriptional and translational regulatory sequences, such as promoters, enhancers, etc., including about 1 kb, but possibly more, of flanking genomic DNA at either the 5′ and 3′ end of the transcribed region. The genomic DNA can be isolated as a fragment of 100 kb or smaller; and substantially free of flanking chromosomal sequence. The genomic DNA flanking the coding region, either 3′ and 5′, or internal regulatory sequences as sometimes found in introns, contains sequences required for expression.

[0032] The nucleic acid compositions of the subject invention can encode all or a part of the subject expressed polypeptides. Double or single stranded fragments can be obtained from the DNA sequence by chemically synthesizing oligonucleotides in accordance with conventional methods, by restriction enzyme digestion, by PCR amplification, etc. Isolated nucleic acids and nucleic acid fragments of the invention comprise at least about 15 up to about 100 contiguous nucleotides, or up to the complete sequence provided in SEQ ID NOS:1-999. For the most part, fragments will be of at least 15 nt, usually at least 18 nt or 25 nt, and up to at least about 50 contiguous nt in length or more.

[0033] Probes specific to the nucleic acids of the invention can be generated using the nucleic acid sequences disclosed in SEQ ID NOS:1-999 and the fragments as described above. The probes can be synthesized chemically or can be generated from longer nucleic acids using restriction enzymes. The probes can be labeled, for example, with a radioactive, biotinylated, or fluorescent tag. Preferably, probes are designed based upon an identifying sequence of a nucleic acid of one of SEQ ID NOS:1-999. More preferably, probes are designed based on a contiguous sequence of one of the subject nucleic acids that remain unmasked following application of a masking program for masking low complexity (e.g., XBLAST) to the sequence., i.e. one would select an unmasked region, as indicated by the nucleic acids outside the poly-n stretches of the masked sequence produced by the masking program.

[0034] The nucleic acids of the subject invention are isolated and obtained in substantial purity, generally as other than an intact chromosome. Usually, the nucleic acids, either as DNA or RNA, will be obtained substantially free of other naturally-occurring nucleic acid sequences, generally being at least about 50%, usually at least about 90% pure and are typically “recombinant”, e.g., flanked by one or more nucleotides with which it is not normally associated on a naturally occurring chromosome.

[0035] The nucleic acids of the invention can be provided as a linear molecule or within a circular molecule. They can be provided within autonomously replicating molecules (vectors) or within molecules without replication sequences. They can be regulated by their own or by other regulatory sequences, as is known in the art. The nucleic acids of the invention can be introduced into suitable host cells using a variety of techniques which are available in the art, such as transferrin polycation-mediated DNA transfer, transfection with naked or encapsulated nucleic acids, liposome-mediated DNA transfer, intracellular transportation of DNA-coated latex beads, protoplast fusion, viral infection, electroporation, gene gun, calcium phosphate-mediated transfection, and the like.

[0036] The subject nucleic acid compositions can be used to, for example, produce polypeptides, as probes for the detection of mRNA of the invention in biological samples, e.g. extracts of cells, to generate additional copies of the nucleic acids, to generate ribozymes or antisense oligonucleotides, and as single stranded DNA probes or as triple-strand forming oligonucleotides. The probes described herein can be used to, for example, determine the presence or absence of the nucleic acid sequences as shown in SEQ ID NOS:1-999 or variants thereof in a sample. These and other uses are described in more detail below.

### Use of Nucleic Acids as Coding Sequences

[0037] Naturally occurring Arabidopsis polypeptides or fragments thereof are encoded by the provided nucleic acids. Methods are known in the art to determine whether the complete native protein is encoded by a candidate nucleic acid sequence. Where the provided sequence encodes a fragment of a polypeptide, methods known in the art may be used to determine the remaining sequence. These approaches may utilize a bioinformatics approach, a cloning approach, extension of mRNA species, etc.

[0038] Substantial genomic sequence is available for Arabidopsis, and may be exploited for determining the complete coding sequence corresponding to the provided sequences. The region of the chromosome to which a given sequence is located may be determined by hybridization or by database searching. The genomic sequence is then searched upstream and downstream for the presence of intron/exon boundaries, and for motifs characteristic of transcriptional start and stop sequences, for example by using Genscan (Burge and Karlin (1997) J. Mol. Biol. 268:78-94); or GRAIL (Uberbacher and Mural (1991) P.N.A.S. 88:11261-1265).

[0039] Alternatively, nucleic acid having a sequence of one of SEQ ID NOS:1-999, or an identifying fragment thereof, is used as a hybridization probe to complementary molecules in a cDNA library using probe design methods, cloning methods, and clone selection techniques as known in the art. Libraries of cDNA are made from selected cells. The cells may be those of A. thaliana, or of related species. In some cases it will be desirable to select cells from a particular stage, e.g. seeds, leaves, infected cells, etc.

[0040] Techniques for producing and probing nucleic acid sequence libraries are described, for example, in Sambrook et al., Molecular Cloning: A Laboratory Manual, 2^{nd} Ed., (1989) Cold Spring Harbor Press, Cold Spring Harbor, N.Y.; and Current Protocols in Molecular Biology, (1987 and updates) Ausubel et al., eds. The cDNA can be prepared by using primers based on sequence from SEQ ID NOS:1-999. In one embodiment, the cDNA library can be made from only poly-adenylated mRNA. Thus, poly-T primers can be used to prepare cDNA from the mRNA.

[0041] Members of the library that are larger than the provided nucleic acids, and preferably that encompass the complete coding sequence of the native message, are obtained. In order to confirm that the entire cDNA has been obtained, RNA protection experiments are performed as follows. Hybridization of a full-length cDNA to an mRNA will protect the RNA from RNase degradation. If the cDNA is not full length, then the portions of the mRNA that are not hybridized will be subject to RNase degradation. This is assayed, as is known in the art, by changes in electrophoretic mobility on polyacrylamide gels, or by detection of released monoribonucleotides. Sambrook et al., Molecular Cloning: A Laboratory Manual, 2^{nd} Ed., (1989) Cold Spring Harbor Press, Cold Spring Harbor, N.Y. In order to obtain additional sequences 5′ to the end of a partial cDNA, 5′ RACE (PCR Protocols: A Guide to Methods and Applications, (1990) Academic Press, Inc.) may be performed.

[0042] Genomic DNA is isolated using the provided nucleic acids in a manner similar to the isolation of full-length cDNAs. Briefly, the provided nucleic acids, or portions thereof, are used as probes to libraries of genomic DNA. Preferably, the library is obtained from the cell type that was used to generate the nucleic acids of the invention, but this is not essential. Such libraries can be in vectors suitable for carrying large segments of a genome, such as P1 or YAC, as described in detail in Sambrook et al., 9.4-9.30. In order to obtain additional 5′ or 3′ sequences, chromosome walking is performed, as described in Sambrook et al., such that adjacent and overlapping fragments of genomic DNA are isolated. These are mapped and pieced together, as is known in the art, using restriction digestion enzymes and DNA ligase.

[0043] PCR methods may be used to amplify the members of a cDNA library that comprise the desired insert. In this case, the desired insert will contain sequence from the full length cDNA that corresponds to the instant nucleic acids. Such PCR methods include gene trapping and RACE methods. Gene trapping entails inserting a member of a cDNA library into a vector. The vector then is denatured to produce single stranded molecules. Next, a substrate-bound probe, such a biotinylated oligo, is used to trap cDNA inserts of interest. Biotinylated probes can be linked to an avidin-bound solid substrate. PCR methods can be used to amplify the trapped cDNA. To trap sequences corresponding to the full length genes, the labeled probe sequence is based on the nucleic acid sequences of the invention. Random primers or primers specific to the library vector can be used to amplify the trapped cDNA. Such gene trapping techniques are described in Gruber et aL, WO 95/04745 and Gruber et al., U.S. Pat. No. 5,500,356. Kits are commercially available to perform gene trapping experiments from, for example, Life Technologies, Gaithersburg, Md., USA.

[0044] “Rapid amplification of cDNA ends”, or RACE, is a PCR method of amplifying cDNAs from a number of different RNAs. The cDNAs are ligated to an oligonucleotide linker, and amplified by PCR using two primers. One primer is based on sequence from the instant nucleic acids, for which full length sequence is desired, and a second primer comprises sequence that hybridizes to the oligonucleotide linker to amplify the cDNA. A description of this methods is reported in WO 97/19110. A common primer may be designed to anneal to an arbitrary adaptor sequence ligated to cDNA ends. When a single gene-specific RACE primer is paired with the common primer, preferential amplification of sequences between the single gene specific primer and the common primer occurs. Commercial cDNA pools modified for use in RACE are available.

[0045] Once the full-length cDNA or gene is obtained, DNA encoding variants can be prepared by site-directed mutagenesis, described in detail in Sambrook et al., 15.3-15.63. The choice of codon or nucleotide to be replaced can be based on disclosure herein on optional changes in amino acids to achieve altered protein structure and/or function. As an alternative method to obtaining DNA or RNA from a biological material, nucleic acid comprising nucleotides having the sequence of one or more nucleic acids of the invention can be synthesized.

### Expresion of Polypeptides

[0046] The provided nucleic acid, e.g. a nucleic acid having a sequence of one of SEQ ID NOS:1-999), the corresponding cDNA, the polypeptide coding sequence as described above, or the full-length gene is used to express a partial or complete gene product. Constructs of nucleic acids having sequences of SEQ ID NOS:1-999 can be generated by recombinant methods, synthetically, or in a single-step assembly of a gene and entire plasmid from large numbers of oligodeoxyribonucleotides is described by, e.g. Stemmer et al., Gene (Amsterdam) (1995) 164(1):49-53.

[0047] Appropriate nucleic acid constructs are purified using standard recombinant DNA techniques as described in, for example, Sambrook et al., Molecular Cloning: A Laboratory Manual, 2^{nd} Ed., (1989) Cold Spring Harbor Press, Cold Spring Harbor, N.Y. The gene product encoded by a nucleic acid of the invention is expressed in any expression system, including, for example, bacterial, yeast, insect, amphibian and mammalian systems.

[0048] The subject nucleic acid molecules are generally propagated by placing the molecule in a vector. Viral and non-viral vectors are used, including plasmids. The choice of plasmid will depend on the type of cell in which propagation is desired and the purpose of propagation. Certain vectors are useful for amplifying and making large amounts of the desired DNA sequence. Other vectors are suitable for expression in cells in culture. Still other vectors are suitable for transfer and expression in cells in a whole organism or person. The choice of appropriate vector is well within the skill of the art. Many such vectors are available commercially.

[0049] The nucleic acids set forth in SEQ ID NOS:1-999 or their corresponding full-length nucleic acids are linked to regulatory sequences as appropriate to obtain the desired expression properties. These can include promoters attached either at the 5′ end of the sense strand or at the 3′ end of the antisense strand, enhancers, terminators, operators, repressors, and inducers. The promoters can be regulated or constitutive. In some situations it may be desirable to use conditionally active promoters, such as tissue-specific or developmental stage-specific promoters. These are linked to the desired nucleotide sequence using the techniques described above for linkage to vectors. Any techniques known in the art can be used.

[0050] When any of the above host cells, or other appropriate host cells or organisms, are used to replicate and/or express the nucleic acids or nucleic acids of the invention, the resulting replicated nucleic acid, RNA, expressed protein or polypeptide, is within the scope of the invention as a product of the host cell or organism. The product is recovered by any appropriate means known in the art.

### Identification of Functional and Structural Motifs

[0051] Translations of the nucleotide sequence of the provided nucleic acids, cDNAs or full genes can be aligned with individual known sequences. Similarity with individual sequences can be used to determine the activity of the polypeptides encoded by the nucleic acids of the invention. Also, sequences exhibiting similarity with more than one individual sequence can exhibit activities that are characteristic of either or both individual sequences.

[0052] The six possible reading frames may be translated using programs such as GCG pepdata, or GCG Frames (Wisconsin Package Version 10.0, Genetics Computer Group (GCG) , Madison, Wis., USA. ). Programs such as ORFFinder (National Center for Biotechnology Information (NCBI) a division of the National Library of Medicine (NLM) at the National Institutes of Health (NIH) http://www.ncbi.nlm.nih.gov/) may be used to identify open reading frames (ORFs) in sequences. ORF finder identifies all possible ORFs in a DNA sequence by locating the standard and alternative stop and start codons. Other ORF identification programs include Genie (Kulp et al. (1996).

[0053] A generalized Hidden Markov Model may be used for the recognition of genes in DNA. (ISMB-96, St. Louis, MO, AAAI/MIT Press; Reese et al. (1997), “Improved splice site detection in Genie”. Proceedings of the First Annual International Conference on Computational Molecular Biology RECOMB 1997, Santa Fe, N.Mex., ACM Press, New York., P. 34.); BESTORF—Prediction of potential coding fragment in human or plant EST/mRNA sequence data using Markov Chain Models; and FGENEP—Multiple genes structure prediction in plant genomic DNA (Solovyev et al. (1995) Identification of human gene structure using linear discriminant functions and dynamic programming. In Proceedings of the Third International Conference on Intelligent Systems for Molecular Biology eds. Rawling et al. Cambridge, England, AAAI Press,367-375.; Solovyev et aL (1994) Nucl. Acids Res. 22(24):5156-5163; Solovyev et al,. The prediction of human exons by oligonucleotide composition and discriminant analysis of spliceable open reading frames, in: The Second International conference on Intelligent systems for Molecular Biology (eds. Altman et al.), AAAI Press, Menlo Park, Calif. (1994, 354-362) Solovyev and Lawrence, Prediction of human gene structure using dynamic programming and oligonucleotide composition, In: Abstracts of the 4th annual Keck symposium. Pittsburgh, 47,1993; Burge and Karlin (1997) J. Mol. Biol. 268:78-94; Kulp et al. (1996) Proc. Conf. on Intelligent Systems in Molecular Biology ′96, 134-142).

[0054] The full length sequences and fragments of the nucleic acid sequences of the nearest neighbors can be used as probes and primers to identify and isolate the full length sequence corresponding to provided nucleic acids. Typically, a selected nucleic acid is translated in all six frames to determine the best alignment with the individual sequences. These amino acid sequences are referred to, generally, as query sequences, which are aligned with the individual sequences. Suitable databases include Genbank, EMBL, and DNA Database of Japan (DDBJ).

[0055] Query and individual sequences can be aligned using the methods and computer programs described above, and include BLAST, available by ftp at ftp://ncbi.nlm.nih.gov/.

[0056] Gapped BLAST and PSI-BLAST are useful search tools provided by NCBI. (version 2.0) (Altschul et al., 1997). Position-Specific Iterated BLAST (PSI-BLAST) provides an automated, easy-to-use version of a “profile” search, which is a sensitive way to look for sequence homologues. The program first performs a gapped BLAST database search. The PSI-BLAST program uses the information from any significant alignments returned to construct a position-specific score matrix, which replaces the query sequence for the next round of database searching. PSI-BLAST may be iterated until no new significant alignments are found. The Gapped BLAST algorithm allows gaps (deletions and insertions) to be introduced into the alignments that are returned. Allowing gaps means that similar regions are not broken into several segments. The scoring of these gapped alignments tends to reflect biological relationships more closely. The Smith-Waterman is another algorithm that produces local or global gapped sequence alignments, see Meth. Mol. Biol. (1997) 70: 173-187. Also, the GAP program using the Needleman and Wunsch global alignment method can be utilized for sequence alignments.

[0057] Results of individual and query sequence alignments can be divided into three categories, high similarity, weak similarity, and no similarity. Individual alignment results ranging from high similarity to weak similarity provide a basis for determining polypeptide activity and/or structure. Parameters for categorizing individual results include: percentage of the alignment region length where the strongest alignment is found, percent sequence identity, and e value.

[0058] The percentage of the alignment region length is calculated by counting the number of residues of the individual sequence found in the region of strongest alignment, e.g. contiguous region of the individual sequence that contains the greatest number of residues that are identical to the residues of the corresponding region of the aligned query sequence. This number is divided by the total residue length of the query sequence to calculate a percentage. For example, a query sequence of 20 amino acid residues might be aligned with a 20 amino acid region of an individual sequence. The individual sequence might be identical to amino acid residues 5, 9-15, and 17-19 of the query sequence. The region of strongest alignment is thus the region stretching from residue 9-19, an 11 amino acid stretch. The percentage of the alignment region length is: 11 (length of the region of strongest alignment) divided by (query sequence length) 20 or 55%.

[0059] Percent sequence identity is calculated by counting the number of amino acid matches between the query and individual sequence and dividing total number of matches by the number of residues of the individual sequences found in the region of strongest alignment. Thus, the percent identity in the example above would be 10 matches divided by 11 amino acids, or approximately, 90.9% E value is the probability that the alignment was produced by chance. For a single alignment, the e value can be calculated according to Karlin et al., Proc. Natl. Acad. Sci. (1990) 87:2264 and Karlin et al., Proc. Natl. Acad. Sci. (1993) 90. The e value of multiple alignments using the same query sequence can be calculated using an heuristic approach described in Altschul et al., Nat. Genet. (1994) 6:119. Alignment programs such as BLAST program can calculate the e value.

[0060] Another factor to consider for determining identity or similarity is the location of the similarity or identity. Strong local alignment can indicate similarity even if the length of alignment is short. Sequence identity scattered throughout the length of the query sequence also can indicate a similarity between the query and profile sequences. The boundaries of the region where the sequences align can be determined according to Doolittle, supra; BLAST or FASTA programs; or by determining the area where sequence identity is highest.

[0061] In general, in alignment results considered to be of high similarity, the percent of the alignment region length is typically at least about 55% of total length query sequence; more typically, at least about 58%; even more typically; at least about 60% of the total residue length of the query sequence. Usually, percent length of the alignment region can be as much as about 62%; more usually, as much as about 64%; even more usually, as much as about 66%. Further, for high similarity, the region of alignment, typically, exhibits at least about 75% of sequence identity; more typically, at least about 78%; even more typically; at least about 80% sequence identity. Usually, percent sequence identity can be as much as about 82%; more usually, as much as about 84%; even more usually, as much as about 86%.

[0062] The p value is used in conjunction with these methods. The query sequence is considered to have a high similarity with a profile sequence when the p value is less than or equal to 10⁻². Confidence in the degree of similarity between the query sequence and the profile sequence increases as the p value become smaller.

[0063] In general, where alignment results considered to be of weak similarity, there is no minimum percent length of the alignment region nor minimum length of alignment. A better showing of weak similarity is considered when the region of alignment is, typically, at least about 15 amino acid residues in length; more typically, at least about 20; even more typically; at least about 25 amino acid residues in length. Usually, length of the alignment region can be as much as about 30 amino acid residues; more usually, as much as about 40; even more usually, as much as about 60 amino acid residues. Further, for weak similarity, the region of alignment, typically, exhibits at least about 35% of sequence identity; more typically, at least about 40%; even more typically; at least about 45% sequence identity. Usually, percent sequence identity can be as much as about 50%; more usually, as much as about 55%; even more usually, as much as about 60%.

[0064] The query sequence is considered to have a low similarity with a profile sequence when the p value is greater than 10⁻². Confidence in the degree of similarity between the query sequence and the profile sequence decreases as the p values become larger.

[0065] Sequence identity alone can be used to determine similarity of a query sequence to an individual sequence and can indicate the activity of the sequence. Such an alignment, preferably, permits gaps to align sequences. Typically, the query sequence is related to the profile sequence if the sequence identity over the entire query sequence is at least about 15%; more typically, at least about 20%; even more typically, at least about 25%; even more typically, at least about 50%. Sequence identity alone as a measure of similarity is most useful when the query sequence is usually, at least 80 residues in length; more usually, 90 residues; even more usually, at least 95 amino acid residues in length. More typically, similarity can be concluded based on sequence identity alone when the query sequence is preferably 100 residues in length; more preferably, 120 residues in length; even more preferably, 150 amino acid residues in length.

[0066] It is apparent, when studying protein sequence families, that some regions have been better conserved than others during evolution. These regions are generally important for the function of a protein and/or for the maintenance of its three- dimensional structure. By analyzing the constant and variable properties of such groups of similar sequences, it is possible to derive a signature for a protein family or domain, which distinguishes its members from all other unrelated proteins. A pertinent analogy is the use of fingerprints by the police for identification purposes. A fingerprint is generally sufficient to identify a given individual. Similarly, a protein signature can be used to assign a new sequence to a specific family of proteins and thus to formulate hypotheses about its function. The PROSITE database is a compendium of such fingerprints (motifs) and may be used with search software such as Wisconsin GCG Motifs to find motifs or fingerprints in query sequences. PROSITE currently contains signatures specific for about a thousand protein families or domains. Each of these signatures comes with documentation providing background information on the structure and function of these proteins (Hofmann et al. (1999) Nucleic Acids Res. 27:215-219; Bucher and Bairoch ., A generalized profile syntax for biomolecular sequences motifs and its function in automatic sequence interpretation (In) ISMB-94; Proceedings 2nd International Conference on Intelligent Systems for Molecular Biology; Altman et al. Eds. (1994), pp 53-61, AAAI Press, Menlo Park).

[0067] Translations of the provided nucleic acids can be aligned with amino acid profiles that define either protein families or common motifs. Also, translations of the provided nucleic acids can be aligned to multiple sequence alignments (MSA) comprising the polypeptide sequences of members of protein families or motifs. Similarity or identity with profile sequences or MSAs can be used to determine the activity of the gene products (e.g., polypeptides) encoded by the provided nucleic acids or corresponding cDNA or genes.

[0068] Profiles can designed manually by (1) creating an MSA, which is an alignment of the amino acid sequence of members that belong to the family and (2) constructing a statistical representation of the alignment. Such methods are described, for example, in Birney et al., Nucl. Acid Res. (1996) 24(14): 2730-2739. MSAs of some protein families and motifs are available for downloading to a local server. For example, the PFAM database with MSAs of 547 different families and motifs, and the software (HMMER) to search the PFAM database may be downloaded from ftp://ftp.genetics.wustl.edu/pub/eddy/pfam-4.4/ to allow secure searches on a local server. Pfam is a database of multiple alignments of protein domains or conserved protein regions., which represent evolutionary conserved structure that has implications for the protein's function (Sonnhammer et al. (1998) Nucl. Acid Res. 26:320-322; Bateman et al. (1999) Nucleic Acids Res. 27:260-262).

[0069] The 3D_ali databank (Pasarella, S. and Argos, P. (1992) Prot. Engineering 5:121-137) was constructed to incorporate new protein structural and sequence data. The databank has proved useful in many research fields such as protein sequence and structure analysis and comparison, protein folding, engineering and design and evolution. The collection enhances present protein structural knowledge by merging information from proteins of similar main-chain fold with homologous primary structures taken from large databases of all known sequences. 3D_ali databank files may be downloaded to a secure local server from hftp://www.emblheidelberg.de/argos/ali/ali_form.html.

[0070] The identify and function of the gene that correlates to a nucleic acid described herein can be determined by screening the nucleic acids or their corresponding amino acid sequences against profiles of protein families. Such profiles focus on common structural motifs among proteins of each family. Publicly available profiles are known in the art.

[0071] In comparing a novel nucleic acid with known sequences, several alignment tools are available. Examples include PileUp, which creates a multiple sequence alignment, and is described in Feng et al., J. Mol. Evol. (1987) 25:351. Another method, GAP, uses the alignment method of Needleman et al., J. Mol. Biol. (1970) 48:443. GAP is best suited for global alignment of sequences. A third method, BestFit, functions by inserting gaps to maximize the number of matches using the local homology algorithm of Smith et al. (1981) Adv. AppI. Math. 2:482.

### Idemtofocatopm pf Secreted & Membrane-Bound Polypeptides

[0072] Secreted and membrane-bound polypeptides of the present invention are of interest. Because both secreted and membrane-bound polypeptides comprise a fragment of contiguous hydrophobic amino acids, hydrophobicity predicting algorithms can be used to identify such polypeptides. A signal sequence is usually encoded by both secreted and membrane-bound polypeptide genes to direct a polypeptide to the surface of the cell. The signal sequence usually comprises a stretch of hydrophobic residues. Such signal sequences can fold into helical structures. Membrane-bound polypeptides typically comprise at least one transmembrane region that possesses a stretch of hydrophobic amino acids that can transverse the membrane. Some transmembrane regions also exhibit a helical structure. Hydrophobic fragments within a polypeptide can be identified by using computer algorithms. Such algorithms include Hopp & Woods, Proc. Natl. Acad. Sci. USA (1981) 78:3824-3828; Kyte & Doolittle, J. Mol. Biol. (1982) 157: 105-132; and RAOAR algorithm, Degli Esposti et al., Eur. J. Biochem. (1990) 190: 207-219.

[0073] Another method of identifying secreted and membrane-bound polypeptides is to translate the nucleic acids of the invention in all six frames and determine if at least 8 contiguous hydrophobic amino acids are present. Those translated polypeptides with at least 8; more typically, 10; even more typically, 12 contiguous hydrophobic amino acids are considered to be either a putative secreted or membrane bound polypeptide. Hydrophobic amino acids include alanine, glycine, histidine, isoleucine, leucine, lysine, methionine, phenylalanine, proline, threonine, tryptophan, tyrosine, and valine.

### Identification of the Function of an Expresion Product

[0074] The biological function of the encoded gene product of the invention may be determined by empirical or deductive methods. One promising avenue, termed phylogenomics, exploits the use of evolutionary information to facilitate assignment of gene function. The approach is based on the idea that functional predictions can be greatly improved by focusing on how genes became similar in sequence during evolution instead of focusing on the sequence similarity itself. One of the major efficiencies that has emerged from plant genome research to date is that a large percentage of higher plant genes can be assigned some degree of function by comparing them with the sequences of genes of known function.

[0075] Alternatively, “reverse genetics” is used to identify gene function. Large collections of insertion mutants are available for Arabidopsis, maize, petunia, and snapdragon. These collections can be screened for an insertional inactivation of any gene by using the polymerase chain reaction (PCR) primed with oligonucleotides based on the sequences of the target gene and the insertional mutagen. The presence of an insertion in the target gene is indicated by the presence of a PCR product. By multiplexing DNA samples, hundreds of thousands of lines can be screened and the corresponding mutant plants can be identified with relatively small effort. Analysis of the phenotype and other properties of the corresponding mutant will provide an insight into the function of the gene.

[0076] In one method of the invention, the gene function in a transgenic Arabidopsis plant is assessed with anti-sense constructs. A high degree of gene duplication is apparent in Arabidopsis, andmany of the gene duplications in Arabidopsis are very tightly linked. Large numbers of transgenic Arabidopsis plants can be generated by infecting flowers with Agrobacterium tumefaciens containing an insertional mutagen, a method of gene silencing based on producing double-stranded RNA from bidirectional transcription of genes in transgenic plants can be broadly useful for high-throughput gene inactivation (Clough and Bent (1999) Plant J. 17; Waterhouse et al. (1998) Proc. Nati. Acad. Sci. U.S.A. 95:13959). This method may use promoters that are expressed in only a few cell types or at a particular developmental stage or in response to an external stimulus. This could significantly obviate problems associated with the lethality of some mutations.

[0077] Virus-induced gene silencing may also find use for suppressing gene function. This method exploits the fact that some or all plants have a surveillance system that can specifically recognize viral nucleic acids and mount a sequence-specific suppression of viral RNA accumulation. By inoculating plants with a recombinant virus containing part of a plant gene, it is possible to rapidly silence the endogenous plant gene.

[0078] Antisense nucleic acids are designed to specifically bind to RNA, resulting in the formation of RNA-DNA or RNA-RNA hybrids, with an arrest of DNA replication, reverse transcription or messenger RNA translation. Antisense nucleic acids based on a selected nucleic acid sequence can interfere with expression of the corresponding gene. Antisense nucleic acids are typically generated within the cell by expression from antisense constructs that contain the antisense strand as the transcribed strand. Antisense nucleic acids based on the disclosed nucleic acids will bind and/or interfere with the translation of mRNA comprising a sequence complementary to the antisense nucleic acid. The expression products of control cells and cells treated with the antisense construct are compared to detect the protein product of the gene corresponding to the nucleic acid upon which the antisense construct is based. The protein is isolated and identified using routine biochemical methods.

[0079] As an alternative method for identifying function of the gene corresponding to a nucleic acid disclosed herein, dominant negative mutations are readily generated for corresponding proteins that are active as homomultimers. A mutant polypeptide will interact with wild-type polypeptides (made from the other allele) and form a non-functional multimer. Thus, a mutation is in a substrate-binding domain, a catalytic domain, or a cellular localization domain. Preferably, the mutant polypeptide will be overproduced. Point mutations are made that have such an effect. In addition, fusion of different polypeptides of various lengths to the terminus of a protein can yield dominant negative mutants. General strategies are available for making dominant negative mutants (see for example, Herskowitz (1987) Nature 329:219). Such techniques can be used to create loss of function mutations, which are useful for determining protein function.

[0080] Another approach for discovering the function of genes utilizes gene chips and microarrays. DNA sequences representing all the genes in an organism can be placed on miniature solid supports and used as hybridization substrates to quantitate the expression of all the genes represented in a complex mRNA sample. This information is used to provide extensive databases of quantitative information about the degree to which each gene responds to pathogens, pests, drought, cold, salt, photoperiod, and other environmental variation. Similarly, one obtains extensive information about which genes respond to changes in developmental processes such as germination and flowering. One can therefore determine which genes respond to the phytohormones, growth regulators, safeners, herbicides, and related agrichemicals. These databases of gene expression information provide insights into the “pathways” of genes that control complex responses. The accumulation of DNA microarray or gene chip data from many different experiments creates a powerful opportunity to assign functional information to genes of otherwise unknown function. The conceptual basis of the approach is that genes that contribute to the same biological process will exhibit similar patterns of expression. Thus, by clustering genes based on the similarity of their relative levels of expression in response to diverse stimuli or developmental or environmental conditions, it is possible to assign functions to many genes based on the known function of other genes in the cluster.

### Construction of Polypeptides of the Invention and Variants Thereof

[0081] The polypeptides of the invention include those encoded by the disclosed nucleic acids. These polypeptides can also be encoded by nucleic acids that, by virtue of the degeneracy of the genetic code, are not identical in sequence to the disclosed nucleic acids. Thus, the invention includes within its scope a polypeptide encoded by a nucleic acid having the sequence of any one of SEQ ID NOS: 1-999 or a variant thereof.

[0082] In general, the term “polypeptide” as used herein refers to both the full length polypeptide encoded by the recited nucleic acid, the polypeptide encoded by the gene represented by the recited nucleic acid, as well as portions or fragments thereof. “Polypeptides” also includes variants of the naturally occurring proteins, where such variants are homologous or substantially similar to the naturally occurring protein, and can be of an origin of the same or different species as the naturally occurring protein. In general, variant polypeptides have a sequence that has at least about 80%, usually at least about 90%, and more usually at least about 98% sequence identity with a differentially expressed polypeptide of the invention, as measured by BLAST using the parameters described above. The variant polypeptides can be naturally or non-naturally glycosylated, i.e., the polypeptide has a glycosylation pattern that differs from the glycosylation pattern found in the corresponding naturally occurring protein.

[0083] In general, the polypeptides of the subject invention are provided in a non-naturally occurring environment, e.g. are separated from their naturally occurring environment. In certain embodiments, the subject protein is present in a composition that is enriched for the protein as compared to a control. As such, purified polypeptide is provided, where by purified is meant that the protein is present in a composition that is substantially free of non-differentially expressed polypeptides, where by substantially free is meant that less than 90%, usually less than 60% and more usually less than 50% of the composition is made up of non-differentially expressed polypeptides.

[0084] Also within the scope of the invention are variants; variants of polypeptides include mutants, fragments, and fusions. Mutants can include amino acid substitutions, additions or deletions. The amino acid substitutions can be conservative amino acid substitutions or substitutions to eliminate non-essential amino acids, such as to alter a glycosylation site, a phosphorylation site or an acetylation site, or to minimize misfolding by substitution or deletion of one or more cysteine residues that are not necessary for function. Conservative amino acid substitutions are those that preserve the general charge, hydrophobicity/hydrophilicity, and/or steric bulk of the amino acid substituted.

[0085] Variants also include fragments of the polypeptides disclosed herein, particularly biologically active fragments and/or fragments corresponding to functional domains. Fragments of interest will typically be at least about 10 amino acids (aa) to at least about 15 aa in length, usually at least about 50 aa in length, and can be as long as 300 aa in length or longer, but will usually not exceed about 1000 aa in length, where the fragment will have a stretch of amino acids that is identical to a polypeptide encoded by a nucleic acid having a sequence of any SEQ ID NOS:1-999, or a homolog thereof.

[0086] The protein variants described herein are encoded by nucleic acids that are within the scope of the invention. The genetic code can be used to select the appropriate codons to construct the corresponding variants.

### Librarie and Arrays

[0087] In general, a library of biopolymers is a collection of sequence information, which information is provided in either biochemical form (e.g., as a collection of nucleic acid or polypeptide molecules), or in electronic form (e.g., as a collection of genetic sequences stored in a computer-readable form, as in a computer system and/or as part of a computer program). The term biopolymer, as used herein, is intended to refer to polypeptides, nucleic acids, and derivatives thereof, which molecules are characterized by the possession of genetic sequences either corresponding to, or encoded by, the sequences set forth in the provided sequence list (seqlist). The sequence information can be used in a variety of ways, e.g., as a resource for gene discovery, as a representation of sequences expressed in a selected cell type, e.g. cell type markers, etc.

[0088] The nucleic acid libraries of the subject invention include sequence information of a plurality of nucleic acid sequences, where at least one of the nucleic acids has a sequence of any of SEQ ID NOS:1-999. By plurality is meant one or more, usually at least 2 and can include up to all of SEQ ID NOS:1-999. The length and number of nucleic acids in the library will vary with the nature of the library, e.g., if the library is an oligonucleotide array, a cDNA array, a computer database of the sequence information, etc.

[0089] Where the library is an electronic library, the nucleic acid sequence information can be present in a variety of media. “Media” refers to a manufacture, other than an isolated nucleic acid molecule, that contains the sequence information of the present invention. Such a manufacture provides the sequences or a subset thereof in a form that can be examined by means not directly applicable to the sequence as it exists in a nucleic acid. For example, the nucleotide sequence of the present invention, e.g. the nucleic acid sequences of any of the nucleic acids of SEQ ID NOS:1-999, can be recorded on computer readable media, e.g. any medium that can be read and accessed directly by a computer. Such media include, but are not limited to: magnetic storage media, such as a floppy disc, a hard disc storage medium, and a magnetic tape; optical storage media such as CD-ROM; electrical storage media such as RAM and ROM; and hybrids of these categories such as magnetic/optical storage media. One of skill in the art can readily appreciate how any of the presently known computer readable mediums can be used to create a manufacture comprising a recording of the present sequence information. “Recorded” refers to a process for storing information on computer readable medium, using any such methods as known in the art. Any convenient data storage structure can be chosen, based on the means used to access the stored information. A variety of data processor programs and formats can be used for storage, e.g. word processing text file, database format, etc. In addition to the sequence information, electronic versions of the libraries of the invention can be provided in conjunction or connection with other computer-readable information and/or other types of computer-readable files (e.g., searchable files, executable files, etc, including, but not limited to, for example, search program software, etc.) By providing the nucleotide sequence in computer readable form, the information can be accessed for a variety of purposes. Computer software to access sequence information is publicly available. For example, the BLAST (Altschul et al., supra.) and BLAZE (Brutlag et al. Comp. Chem. (1993) 17:203) search algorithms on a Sybase system can be used identify open reading frames (ORFs) within the genome that contain homology to ORFs from other organisms.

[0090] As used herein, “a computer-based system” refers to the hardware means, software means, and data storage means used to analyze the nucleotide sequence information of the present invention. The minimum hardware of the computer-based systems of the present invention comprises a central processing unit (CPU), input means, output means, and data storage means. A skilled artisan can readily appreciate that any one of the currently available computer-based system are suitable for use in the present invention. The data storage means can comprise any manufacture comprising a recording of the present sequence information as described above, or a memory access means that can access such a manufacture.

[0091] “Search means” refers to one or more programs implemented on the computer-based system, to compare a target sequence or target structural motif with the stored sequence information. Search means are used to identify fragments or regions of the genome that match a particular target sequence or target motif. A variety of known algorithms are publicly known and commercially available, e.g. MacPattern (EMBL), BLASTN, BLASTX (NCBI) and tBLASTX. A “target sequence” can be any DNA or amino acid sequence of six or more nucleotides or two or more amino acids, preferably from about 10 to 100 amino acids or from about 30 to 300 nucleotide residues.

[0092] A “target structural motif,” or “target motif,” refers to any rationally selected sequence or combination of sequences in which the sequence(s) are chosen based on a three-dimensional configuration that is formed upon the folding of the target motif, or on consensus sequences of regulatory or active sites. There are a variety of target motifs known in the art. Protein target motifs include, but arc not limited to, enzyme active sites and signal sequences. Nucleic acid target motifs include, but are not limited to, hairpin structures, promoter sequences and other expression elements such as binding sites for transcription factors.

[0093] A variety of structural formats for the input and output means can be used to input and output the information in the computer-based systems of the present invention. One format for an output means ranks fragments of the genome possessing varying degrees of homology to a target sequence or target motif. Such presentation provides a skilled artisan with a ranking of sequences and identifies the degree of sequence similarity contained in the identified fragment.

[0094] A variety of comparing means can be used to compare a target sequence or target motif with the data storage means to identify sequence fragments of the genome. A skilled artisan can readily recognize that any one of the publicly available homology search programs can be used as the search means for the computer based systems of the present invention.

[0095] As discussed above, the “library” of the invention also encompasses biochemical libraries of the nucleic acids of SEQ ID NOS:1-999, e.g., collections of nucleic acids representing the provided nucleic acids. The biochemical libraries can take a variety of forms, e.g. a solution of cDNAs, a pattern of probe nucleic acids stably bound to a surface of a solid support (microarray) and the like. By array is meant an article of manufacture that has a solid support or substrate with one or more nucleic acid targets on one of its surfaces, where the number of distinct nucleic may be in the hundreds, thousand, or tens of thousands. Each nucleic acid will comprise at 18 nt and often at least 25 nt, and often at least 100 to 1000 nucleotides, and may represent up to a complete coding sequence or cDNA.. A variety of different array formats have been developed and are known to those of skill in the art. The arrays of the subject invention find use in a variety of applications, including gene expression analysis, drug screening, mutation analysis and the like, as disclosed in the above-listed exemplary patent documents.

[0096] In addition to the above nucleic acid libraries, analogous libraries of polypeptides are also provided, where the where the polypeptides of the library will represent at least a portion of the polypeptides encoded by SEQ ID NOS:1-999.

### Genetically Altered Cells and Trangenics

[0097] The subject nucleic acids can be used to create genetically modified and transgenic organisms, usually plant cells and plants, which may be monocots or dicots. The term transgenic, as used herein, is defined as an organism into which an exogenous nucleic acid construct has been introduced, generally the exogenous sequences are stably maintained in the genome of the organism. Of particular interest are transgenic organisms where the genomic sequence of germ line cells has been stably altered by introduction of an exogenous construct.

[0098] Typically, the transgenic organism is altered in the genetic expression of the introduced nucleotide sequences as compared to the wild-type, or unaltered organism. For example, constructs that provide for over-expression of a targeted sequence, sometimes referred to as a “knock-in”, provide for increased levels of the gene product. Alternatively, expression of the targeted sequence can be down-regulated or substantially eliminated by introduction of a “knock-out” construct, which may direct transcription of an anti-sense RNA that blocks expression of the naturally occurring mRNA, by deletion of the genomic copy of the targeted sequence, etc.

[0099] In one method, large numbers of genes are simultaneously introduced in order to explore the genetic basis of complex traits, for example by making plant artificial chromosome (PLAC) libraries. The centromeres in Arabidopsis have been mapped and current genome sequencing efforts will extend through these regions. Because Arabidopsis telomeres are very similar to those in yeast one may use a hybrid sequence of alternating plant and yeast sequences that function in both types of organisms, developing yeast artificial chromosome-PLAC libraries, and then introducing them into a suitable plant host to evaluate the phenotypic consequences. By providing a defined chromosomal environment for cloned genes, the use of PLACs may also enhance the ability to produce transgenic plants with defined levels of gene expression.

[0100] It has been found in many organisms that there is significant redundancy in the representation of genes in a genome. That is, a particular gene function is likely by represented by multiple copies of similar coding sequences in the genome. These copies are typically conserved in the amino acid sequence, but may diverge in the sequence of non-translated sequences, and in their codon usage. In order to knock out a particular genetic function in an organism, it may not be sufficient to delete a genomic copy of a single gene. In such cases it may be preferable to achieve a genetic knock-out with an anti-sense construct, particularly where the sequence is aligned with the coding portion of the mRNA.

[0101] Methods of transforming plant cells are well-known in the art, and include protoplast transformation, tungsten whiskers (Coffee et al., U.S. Pat. No. 5,302,523, issued Apr. 12, 1994), directly by microorganisms with infectious plasmids, use of transposons (U.S. Pat. No. 5,792,294), infectious viruses, the use of liposomes, microinjection by mechanical or laser beam methods, by whole chromosomes or chromosome fragments, electroporation, silicon carbide fibers, and microprojectile bombardment.

[0102] For example, one may utilize the biolistic bombardment of meristem tissue, at a very early stage of development, and the selective enhancement of transgenic sectors toward genetic homogeneity, in cell layers that contribute to germline transmission. Biolistics-mediated production of fertile, transgenic maize is described in Gordon-Kamm et aL (1990), Plant Cell 2:603; Fromm et al. (1990) Bio/Technology 8:833, for example. Alternatively, one may use a microorganism, including but not limited to, Agrobacterium tumefaciens as a vector for transforming the cells, particularly where the targeted plant is a dicotyledonous species. See, for example, U.S. Pat. No. 5,635,381. Leung et al. (1990) Curr. Genet. 17(5):409-11 describe integrative transformation of three fertile hermaphroditic strains of Arabidopsis thaliana using plasmids and cosmids that contain an E. Coli gene linked to Aspergillus nidulans regulatory sequences.

[0103] Preferred expression cassettes for cereals may include promoters that are known to express exogenous DNAs in corn cells. For example, the Adhl promoter has been shown to be strongly expressed in callus tissue, root tips, and developing kernels in corn. Promoters that are used to express genes in corn include, but are not limited to, a plant promoter such as the, CaMV 35S promoter (Odell et al., Nature, 313, 810 (1985)), or others such as CaMV 19S (Lawton et al., Plant Mol. Biol., 9, 31 F (1987)), nos (Ebert et al., PNAS USA, 84, 5745 (1987)), Adh (Walker et al., PNAS USA, 84, 6624 (1987)), sucrose synthase (Yang et al., PNAS USA, 87, 4144 (1990)), .alpha.-tubulin, ubiquitin, actin (Wang et al., Mol. Cell. Biol., 12, 3399 (1992)), cab (Sullivan et al., Mol. Gen. Genet, 215, 431 (1989)), PEPCase (Hudspeth et al., Plant Mol. Biol., 12, 579 (1989)), or those associated with the R gene complex (Chandler et al., The Plant Cell, 1, 1175 (1989)). Other promoters useful in the practice of the invention are known to those of skill in the art.

[0104] Tissue-specific promoters, including but not limited to, root-cell promoters (Conkling et al., Plant Physiol., 93, 1203 (1990)), and tissue-specific enhancers (Fromm et al., The Plant Cell, 1, 977 (1989)) are also contemplated to be particularly useful, as are inducible promoters such as water-stress-, ABA- and turgor-inducible promoters (Guerrero et al., Plant Molecular Biology, 15,11-26)), and the like.

[0105] Regulating and/or limiting the expression in specific tissues may be functionally accomplished by introducing a constitutively expressed gene (all tissues) in combination with an antisense gene that is expressed only in those tissues where the gene product is not desired. Expression of an antisense transcript of this preselected DNA segment in an rice grain, using, for example, a zein promoter, would prevent accumulation of the gene product in seed. Hence the protein encoded by the preselected DNA would be present in all tissues except the kernel.

[0106] Alternatively, one may wish to obtain novel tissue-specific promoter sequences for use in accordance with the present invention. To achieve this, one may first isolate cDNA clones from the tissue concerned and identify those clones which are expressed specifically in that tissue, for example, using Northern blotting or DNA microarrays. Ideally, one would like to identify a gene that is not present in a high copy number, but which gene product is relatively abundant in specific tissues. The promoter and control elements of corresponding genomic clones may then be localized using the techniques of molecular biology known to those of skill in the art. Alternatively, promoter elements can be identified using enhancer traps based on T-DNA and/or transposon vector systems (see, for example, Campisi et al. (1999) Plant J. 17:699-707; Gu et al. (1998) Development 125:1509-1517).

[0107] In some embodiments of the present invention expression of a DNA segment in a transgenic plant will occur only in a certain time period during the development of the plant. Developmental timing is frequently correlated with tissue specific gene expression. For example, in corn expression of zein storage proteins is initiated in the endosperm about 15 days after pollination.

[0108] Ultimately, the most desirable DNA segments for introduction into a plant genome may be homologous genes or gene families which encode a desired trait (e.g., increased disease resistance) and which are introduced under the control of novel promoters or enhancers, etc., or perhaps even homologous or tissue-specific (e.g., root-, grain- or leaf-specific) promoters or control elements.

[0109] The genetically modified cells are screened for the presence of the introduced genetic material. The cells may be used in functional studies, drug screening, etc., e.g. to study chemical mode of action, to determine the effect of a candidate agent on pathogen growth, infection of plant cells, etc.

[0110] The modified cells are useful in the study of genetic function and regulation, for alteration of the cellular metabolism, and for screening compounds that may affect the biological function of the gene or gene product. For example, a series of small deletions and/or substitutions may be made in the host's native gene to determine the role of different domains and motifs in the biological function. Specific constructs of interest include anti-sense, as previously described, which will reduce or abolish expression, expression of dominant negative mutations, and over-expression of genes.

[0111] Where a sequence is introduced, the introduced sequence may be either a complete or partial sequence of a gene native to the host, or may be a complete or partial sequence that is exogenous to the host organism, e.g., an A. thaliana sequence inserted into wheat plants. A detectable marker, such as aldA, lac Z, etc. may be introduced into the locus of interest, where upregulation of expression will result in an easily detected change in phenotype.

[0112] One may also provide for expression of the gene or variants thereof in cells or tissues where it is not normally expressed, at levels not normally present in such cells or tissues, or at abnormal times of development, during sporulation, etc. By providing expression of the protein in cells in which it is not normally produced, one can induce changes in cell behavior.

[0113] DNA constructs for homologous recombination will comprise at least a portion of the provided gene or of a gene native to the species of the host organism, wherein the gene has the desired genetic modification(s), and includes regions of homology to the target locus (see Kempin et al. (1997) Nature 389:802-803). DNA constructs for random integration or episomal maintenance need not include regions of homology to mediate recombination. Conveniently, markers for positive and negative selection are included. Methods for generating cells having targeted gene modifications through homologous recombination are known in the art.

[0114] Embodiments of the invention provide processes for enhancing or inhibiting synthesis of a protein in a plant by introducing a provided nucleic acids sequence into a plant cell, where the nucleic acid comprises sequences encoding a protein of interest. For example, enhanced resistance to pathogens may be achieved by inserting a nucleic acid encoding an activator in a vector downstream from a promoter sequence capable of driving constitutive high-level expression in a plant cell. When grown into plants, the transgenic plants exhibit increased synthesis of resistance proteins, and increased resistance to pathogens.

[0115] Other embodiments of the invention provide processes for enhancing or inhibiting synthesis of a tolerance factor in a plant by introducing a nucleic acid of the invention into a plant cell, where the nucleic acid comprises sequences encoding a tolerance factor. For example, enhanced tolerance to an environmental stress may be achieved by inserting a nucleic acid encoding an activator in a vector downstream from a promoter sequence capable of driving constitutive high-level expression in a plant cell. When grown into plants, the transgenic plants exhibit increased synthesis of tolerance proteins, and increased tolerance to environmental stress.

[0116] Factors which are involved, directly or indirectly in biosynthetic pathways whose products are of commercial, nutritional, or medicinal value include any factor, usually a protein or peptide, which regulates such a biosynthetic pathway (e.g., an activator or repressor); which is an intermediate in such a biosynthetic pathway; or which is a product that increases the nutritional value of a food product; a medicinal product; or any product of commercial value and/or research interest. Plant and other cells may be genetically modified to enhance a trait of interest, by upregulating or down-regulating factors in a biosynthetic pathway.

### Screening Assays

[0117] The polypeptides encoded by the provided nucleic acid sequences, and cells genetically altered to express such sequences, are useful in a variety of screening assays to determine effect of candidate inhibitors, activators., or modifiers of the gene product. One may determine what insecticides, fungicides and the like have an enhancing or synergistic activity with a gene. Alternatively, one may screen for compounds that mimic the activity of the protein. Similarly, the effect of activating agents may be used to screen for compounds that mimic or enhance the activation of proteins. Candidate inhibitors of a particular gene product are screened by detecting decreased from the targeted gene product.

[0118] The screening assays may use purified target macromolecules to screen large compound libraries for inhibitory drugs; or the purified target molecule may be used for a rational drug design program, which requires first determining the structure of the macromolecular target or the structure of the macromolecular target in association with its customary substrate or ligand. This information is then used to design compounds which must be synthesized and tested further. Test results are used to refine the molecular models and drug design process in an iterative fashion until a lead compound emerges.

[0119] Drug screening may be performed using an in vitro model, a genetically altered cell, or purified protein. One can identify ligands or substrates that bind to, modulate or mimic the action of the target genetic sequence or its product. A wide variety of assays may be used for this purpose, including labeled in vitro protein-protein binding assays, electrophoretic mobility shift assays, immunoassays for protein binding, and the like. The purified protein may also be used for determination of three-dimensional crystal structure, which can be used for modeling intermolecular interactions.

[0120] Where the nucleic acid encodes a factor involved in a biosynthetic pathway, as described above, it may be desirable to identify factors, e.g., protein factors, which interact with such factors. One can identify interacting factors, ligands, substrates that bind to, modulate or mimic the action of the target genetic sequence or its product. A wide variety of assays may be used for this purpose, including labeled in vitro protein-protein binding assays, electrophoretic mobility shift assays, immunoassays for protein binding, and the like. In vivo assays for protein-protein interactions in E. coli and yeast cells are also well-established (see Hu et aL (2000) Methods 20:80-94; and Bai and Elledge (1997) Methods Enzymol. 283:141-156).

[0121] The purified protein may also be used for determination of three-dimensional crystal structure, which can be used for modeling intermolecular interactions. It may also be of interest to identify agents that modulate the interaction of a factor identified as described above with a factor encoded by a nucleic acid of the invention. Drug screening can be performed to identify such agents. For example, a labeled in vitro protein-protein binding assay can be used, which is conducted in the presence and absence of an agent being tested.

[0122] The term “agent” as used herein describes any molecule, e.g. protein or pharmaceutical, with the capability of altering or mimicking a physiological function. Generally a plurality of assay mixtures are run in parallel with different agent concentrations to obtain a differential response to the various concentrations. Typically, one of these concentrations serves as a negative control, i.e. at zero concentration or below the level of detection.

[0123] Candidate agents encompass numerous chemical classes, though typically they are organic molecules, preferably small organic compounds having a molecular weight of more than 50 and less than about 2,500 daltons. Candidate agents comprise functional groups necessary for structural interaction with proteins, particularly hydrogen bonding, and typically include at least an amine, carbonyl, hydroxyl or carboxyl group, preferably at least two of the functional chemical groups. The candidate agents often comprise cyclical carbon or heterocyclic structures and/or aromatic or polyaromatic structures substituted with one or more of the above functional groups. Candidate agents are also found among biomolecules including peptides, saccharides, fatty acids, steroids, purines, pyrimidines, derivatives, structural analogs or combinations thereof.

[0124] Candidate agents are obtained from a wide variety of sources including libraries of synthetic or natural compounds. For example, numerous means are available for random and directed synthesis of a wide variety of organic compounds and biomolecules, including expression of randomized oligonucleotides and oligopeptides. Alternatively, libraries of natural compounds in the form of bacterial, fungal, plant and organism extracts are available or readily produced. Additionally, natural or synthetically produced libraries and compounds are readily modified through conventional chemical, physical and biochemical means, and may be used to produce combinatorial libraries. Known pharmacological agents may be subjected to directed or random chemical modifications, such as acylation, alkylation, esterification, amidification, etc. to produce structural analogs.

[0125] Where the screening assay is a binding assay, one or more of the molecules may be joined to a label, where the label can directly or indirectly provide a detectable signal. Various labels include radioisotopes, fluorescers, chemiluminescers, enzymes, specific binding molecules, particles, e.g. magnetic particles, and the like. Specific binding molecules include pairs, such as biotin and streptavidin, digoxin and antidigoxin etc. For the specific binding members, the complementary member would normally be labeled with a molecule that provides for detection, in accordance with known procedures.

[0126] A variety of other reagents may be included in the screening assay. These include reagents like salts, neutral proteins, e.g. albumin, detergents, etc that are used to facilitate optimal protein-protein binding and/or reduce non-specific or background interactions. Reagents that improve the efficiency of the assay, such as protease inhibitors, nuclease inhibitors, anti-microbial agents, etc. may be used. The mixture of components are added in any order that provides for the requisite binding. Incubations are performed at any suitable temperature, typically between 4 and 40° C. Incubation periods are selected for optimum activity, but may also be optimized to facilitate rapid high-throughput screening. Typically between 0.1 and 1 hours will be sufficient.

[0127] The compounds having the desired biological activity may be administered in an acceptable carrier to a host. The active agents may be administered in a variety of ways. Depending upon the manner of introduction, the compounds may be formulated in a variety of ways. The concentration of therapeutically active compound in the formulation may vary from about 0.01-100 wt. %.

[0128] It must be noted that as used herein and in the appended claims, the singular forms “a”, “and”, and “the” include plural referents unless the context clearly dictates otherwise. Thus, for example, reference to “a complex” includes a plurality of such complexes and reference to “the formulation” includes reference to one or more formulations and equivalents thereof known to those skilled in the art, and so forth.

[0129] Unless defined otherwise, all technical and scientific terms used herein have the same meaning as commonly understood to one of ordinary skill in the art to which this invention belongs. Although any methods, devices and materials similar or equivalent to those described herein can be used in the practice or testing of the invention, the preferred methods, devices and materials are now described.

[0130] All publications mentioned herein are incorporated herein by reference for the purpose of describing and disclosing, for example, the methods and methodologies that are described in the publications which might be used in connection with the presently described invention. The publications discussed above and throughout the text are provided solely for their disclosure prior to the filing date of the present application. Nothing herein is to be construed as an admission that the inventors are not entitled to antedate such disclosure by virtue of prior invention.

[0131] The following examples are put forth so as to provide those of ordinary skill in the art with a complete disclosure and description of how to make and use the subject invention, and are not intended to limit the scope of what is regarded as the invention. Efforts have been made to ensure accuracy with respect to the numbers used (e.g. amounts, temperature, concentrations, etc.) but some experimental errors and deviations should be allowed for. Unless otherwise indicated, parts are parts by weight, molecular weight is average molecular weight, temperature is in degrees Celsius, and pressure is at or near atmospheric.

### EXPERIMENTAL

### Cloning and Characterization of Arabidopsis thaliana Genes.

[0132] Following DNA isolation, sequencing was performed using the Dye Primer Sequencing protocol, below. The sequencing reactions were loaded by hand onto a 48 lane ABI 377 and run on a 36 cm gel with the 36E-2400 run module and extraction. Gel analysis was performed with ABI software.

[0133] The Phred program was used to read the sequence trace from the ABI sequencer, call the bases and produce a sequence read and a quality score for each base call in the sequence., (Ewing et al. (1998) Genome Research 8:175-185; Ewing and Green (1998) Genome Research 8:186-194.) PolyPhred may be used to detect single nucleotide polymorphisms in sequences (Kwok et al. (1994) Genomics 25:615-622; Nickerson et aL (1997) Nucleic Acids Research 25(14):2745-2751.)

[0134] MicroWave Plasmid Protocol

[0135] Fill Beckman 96 deep-well growth blocks with 1 ml of TB containing 50 μg of ampicillin per ml. Inoculate each well with a colony picked with a toothpick or a 96-pin tool from a glycerol stock plate. Cover the blocks with a plastic lid and tape at two ends to hold lid in place. Incubate overnight (16-24 hours depending on the host stain) at 37° C. with shaking at 275 rpm in a New Brunswick platform shaker. Pellet cells by centrifugation for 20 minutes at 3250 rpm in a Beckman GS-R6K, decant TB and freeze pelleted cell in the 96 well block. Thaw blocks on the bench when ready to continue.

Prepare the MW-Tween20 solution

| For four blocks: | For 16 blocks: |
|---|---|
| 50 ml STET/TWEEN20 | 200 ml STET/TWEEN |
| 2 tubes RNAse (10 mg/ml, 600 ulea) | 8 tubes RNAse |
| 1 tube lysozyme (25 mg) | 4 tubes lysozyme |

[0136] Pipette RNAse and Lysozyme into the corner of a beaker. Add Tween 20 solution and swirl to mix completely. Use the Multidrop (or Biohit) to add 25 ul of sterile H₂O (from the L size autoclaved bottles) to each well. Resuspend the pellets by vortexing on setting 10 of the platform vortexer. Check pellets after 4 min. and repeat as necessary to resuspend completely. Use the multidrop to add 70 μl of the freshly prepared MW-Tween 20 solution to each well. Vortex at setting 6 on the platform vortex for 15 seconds. Do not cause frothing.

[0137] Incubate the blocks at room temperature for 5 min. Place two blocks at a time in the microwave (1000 Watts) with the tape (placed on the H1 to H12 side of the block) facing away from each other and turn on at full power for 30 seconds. Rotate the blocks so that the tapes face towards each other and turn on at full power again for 30 seconds.

[0138] Immediately remove the blocks from the microwave and add 300 μl of sterile ice cold H₂O with the Multidrop. Seal the blocks with foil tape and place them in an H₂O/ice bath. Vortex the blocks on 5 for 15 seconds and leave them in the H₂O/ice bath. Return to step 7 until all the blocks are in the ice water bath. Incubate the blocks for 15 minutes on ice. Spin the blocks for 30 minutes in the Beckman GS-6KR with GH3.8 rotor with Microplus carrier at 3250 rpm.

[0139] Transfer 100 μl of the supernatant to Corning/Costar round bottom 96 well trays. Cover with foil and put into fridge if to be sequenced right away. If not to be sequenced in the next day, freeze them at −20° C.

[0140] Dye Primer Sequencing

[0141] Spin down the DP brew trays and DNA template by pulsing in the Beckman GS-6KR with GH3.8 rotor with Microplus carrier. Big Dye Primer reaction mix trays (one 96 well cycleplate (Robbins) for each nucleotide), 3 microliters of reaction mix per well.

[0142] Use twelve channel pipetter (Costar) to add 2 μl of template to one each G,A,T,C, trays for each template plate. Pulse again to get both the reaction mix and template into the bottom of the cycle plate and put them into the MJ Research DNA Tetrad (PTC-225).

[0143] Start program Dye-Primer. Dye-primer is:

[0144] 96° C., 1 min 1 cycle

[0145] 96° C., 10 sec.

[0146] 55° C., 5 sec.

[0147] 70° C., 1 min 15 cycles

[0148] 96° C., 10 sec.

[0149] 70° C., 1 min. 15 cycles

[0150] 4° C. soak

[0151] When done cycling, using the Robbins Hydra 290 add 100 μl of 100 % ethanol to the A reaction cycle plate and pool the contents of all four cycle plates into the appropriate well.

[0152] To perform ethanol precipitation: Use Hydra program 4 to add 100 μl 100% ethanol to each A tray. Use Hydra program 5 to transfer the ethanol and therefore combine the samples from plate to plate. Once the G, A, T, and C trays of each block are mixed, spin for 30 minutes at 3250 in the Beckman. Pour off the ethanol with a firm shake and blot on a paper towel before drying in the speed vac (˜10 minutes or until dry). If ready to load add 3 μl dye and denature in the oven at 95° C. for ˜5 minutes and load 2 μl. If to store, cover with tape and store at −20° C.

[0153] Common Solutions

[0154] Terrific Broth

[0155] Per liter:

[0156] 900 ml H₂O

[0157] 12 g bacto tryptone

[0158] 24 g bacto-yeast extract

[0159] 4 ml glycerol

[0160] Shake until dissolved and then autoclave. Allow the solution to cool to 60° C. or less and then add 100 ml of sterile 0.17M KH₂PO₄, 0.72M K₂HPO₄ (in the hood w/sterile technique).

[0161] 0.17M KH₂PO₄, 0.72M K₂HPO₄

[0162] Dissolve 2.31g of KH₂PO₄ and 12.54g of K₂HPO₄ in 90 ml of H₂O.

[0163] Adjust volume to 100 ml with H₂O and autoclave.

[0164] Sequence loading Dye

[0165] 20 ml deionized formamide

[0166] 3.6 ml dH₂0

[0167] 400 μl 0.5M EDTA, pH 8.0

[0168] 0.2 g Blue Dextran

[0169] *Light sensitive, cover in foil or store in the dark.

[0170] STET/TWEEN

[0171] 10 ml 5M NaCl

[0172] 5 ml 1M Tris, pH 8.0

[0173] 1 ml 0.5M EDTA., pH 8.0

[0174] 25ml Tween20

[0175] Bring volume to 500 ml with H₂0

[0176] The sequencing reactions are run on an ABI 377 sequencer per manufacturer's' instructions. The sequencing information obtained each run are analyzed as follows.

[0177] Sequencing reads are screened for ribosomal., mitochondrial., chloroplast or human sequence contamination.. In good sequences, vector is marked by x's. These sequences go into biolims regardless of whether or not they pass the criteria for a ‘good’ sequence. This criteria is >=100 bases with phred score of >=20 and 15 of these bases adjacent to each other.

[0178] Sequencing reads that pass the criteria for good sequences are downloaded for assembly into consensus sequences (contigs). The program Phrap (copyrighted by Phil Green at University of Washington, Seattle, Wash.) utilizes both the Phred sequence information and the quality calls to assemble the sequencing reads. Parameters used with Phrap were determined empirically to minimize assembly of chimeric sequences and maximize differential detection of closely related members of gene families. The following parameters were used with the Phrap program to perform the assembly:

| | | |
|---|---|---|
| Penalty | −6 | Penalty for mismatches (substitutions) |
| Minmatch | 40 | Minimum length of matching sequence to use in |
| | | assembly of reads |
| Trim penalty | 0 | penalty used for identifying degenerate sequence |
| | | at beginning and end of read. |
| Minscore | 80 | Minimum alignment score |

[0179] Results from the Phrap analysis yield either contigs consisting of a consensus of two or more overlapping sequence reads, or singlets that are non-overlapping .

[0180] The contig and singlets assembly were further analyzed to eliminate low quality sequence utilizing a program to filter sequences based on quality scores generated by the Phred program. The threshold quality for “high quality” base calls is 20. Sequences with less than 50 contiguous high quality bases calls at the beginning of the sequence, and also at the end of the sequence were discarded. Additionally, the maximum allowable percentage of “low quality base calls in the final sequence is 2%, otherwise the sequence is discarded.

[0181] The stand-alone BLAST programs and Genbank databases were downloaded from NCBI for use on secure servers at the Paradigm Genetics, Inc. site. The sequences from the assembly were compared to the GenBank NR database downloaded from NCBI using the gapped version (2.0) of BLASTX. BLASTX translates the DNA sequence in all six reading frames and compares it to an amino acid database. Low complexity sequences are filtered in the query sequence. (Altschul et al. (1997) Nucleic Acids Res 25(17):3389-402).

[0182] Genbank sequences found in the BLASTX search with an E Value of less than 1e⁻¹⁰ are considered to be highly similar, and the Genbank definition lines were used to annotate the query sequences.

[0183] When no significantly similar sequences were found as a result of the BLASTX search, the query sequences were compared with the PROSITE database (Bairoch, A. 1992) PROSITE: A dictionary of sites and patterns in proteins. Nucleic Acids Research 20:2013-2018. ) to locate functional motifs.

[0184] Query sequences were first translated in six reading frames using the Wisconsin GCG pepdata program (Wisconsin Package Version 10.0, Genetics Computer Group (GCG) , Madison, Wis., USA. ). The Wisconsin GCG motifs program (Wisconsin Package Version 10.0, Genetics Computer Group (GCG), Madison, Wis., USA.) was used to locate motifs in the peptide sequence, with smatches allowed. Motif names from the PROSITE results were used to te these query sequences.

TABLE 1

| SEQ | | |
|---|---|---|
| ID | Reference | Annotation |
| 1 | 2029001 | Pkc_Phospho_Site (34-36) |
| 2 | 2029002 | 3′ 2E-14 >gi\|5103845\|gb\|AAD39675.1\| |
| | | AC007591_40 (AC007591) Strong similarity to |
| | | gb\|AF096285 serine-threonine kinase receptor- |
| | | associated protein from Mus musculus and contains |
| | | 5 PF\|00400 WD40, G-beta repeat domains. EST |
| | | gb\|F14050 comes from this gene. [Arabidopsi. . . |
| | | Length = 333 |
| 3 | 2029003 | 3′ Pkc_Phospho_Site (47-49) |
| 4 | 2029004 | 3′ Pkc_Phospho_Site (47-49) |
| 5 | 2029005 | 3′ Pkc_Phospho_Site (133-135) |
| 6 | 2029006 | 3′ Pkc_Phospho_Site (4-6) |
| 7 | 2029007 | 3′ 1E-47 >gi\|5302785\|emb\|CAB46034.1\| |
| | | (Z97340) epoxide hydrolase [Arabidopsis thaliana] |
| | | Length = 536 |
| 8 | 2029008 | 3′ Tyr_Phospho_Site (205-213) |
| 9 | 2029009 | 5′ 2E-13 >gi\|2130125\|pir\|\|S59853 |
| | | DNA-binding protein Dof3 - maize (fragment) |
| | | >gi\|1061308\|emb\|CAA56288\| (X79935) Dof3 gene |
| | | [Zea mays] Length = 302 |
| 10 | 2029010 | Pkc_Phospho_Site (54-56) |
| 11 | 2029011 | 7E-30 >emb\|CAB46051.1\| (Z97342) beta-amylase |
| | | [Arabidopsis thaliana] Length = 498 |
| 12 | 2029012 | Tyr_Phospho_Site (811-818) |
| 13 | 2029013 | 1E-79 >gb\|AAD25757.1\|AC007060_15 (AC007060) |
| | | Strong similarity to F1913.2 gi\|3033375 berberine |
| | | bridge enzyme from Arabidopsis thaliana |
| | | BAC gb\|AC004238. ESTs |
| | | gb\|F19886, gb\|Z30784 and gb\|Z30785 come from |
| | | this gene. Length = 527 |
| 14 | 2029014 | 1E-20 >gb\|AAD38148.1\|AF139501_1 (AF139501) |
| | | beta-amylase [Prunus armeniaca] Length = 450 |
| 15 | 2029015 | 2E-30 >emb\|CAA66965\| (X98321) peroxidase |
| | | [Arabidopsis thaliana] Length = 329 |
| 16 | 2029016 | 3E-49 >sp\|P49688\|RS2_ARATH 40S |
| | | RIBOSOMAL PROTEIN S2 >gi\|2335095 (AC002339) |
| | | 40S ribosomal protein S2 [Arabidopsis thaliana] |
| | | Length = 285 |
| 17 | 2029017 | Pkc_Phospho_Site (24-26) |
| 18 | 2029018 | 2E-85 >gi\|2088654 (AF002109) 60S acidic |
| | | ribosomal protein P0 isolog [Arabidopsis thaliana] |
| | | Length = 317 |
| 19 | 2029019 | 5E-66 >pir\|\|XUMUVS 3-phosphoshikimate |
| | | 1-carboxyvinyltransferase (EC 2.5.1.19) precursor - |
| | | Arabidopsis thaliana Length = 520 |
| 20 | 2029020 | 6E-51 >gb\|AAD29715.1\|AF140598_1 (AF140598) |
| | | ring-box protein 1 [Homo sapiens]>gi\|4769006\|gb\| |
| | | AAD29716.1\|AF140599_1 (AF140599) ring-box |
| | | protein 1 [Mus musculus] >gi\|4809216\| |
| | | gb\|AAD30146.1\|AF142059_1 (AF142059) |
| | | RING finger protein [Homo sapiens] Length = 108 |
| 21 | 2029021 | Pkc_Phospho_Site (35-37) |
| 22 | 2029022 | 3E-71 >sp\|P43293\|NAK_ARATH PROBABLE |
| | | SERINE/THREONINE PROTEIN KINASE NAK |
| | | >gi\|481206\|pir\|\|S38326 protein kinase - |
| | | Arabidopsis thaliana >gi\|166809 (L07248) protein |
| | | kinase [Arabidopsis thaliana] Length = 389 |
| 23 | 2029023 | Pkc_Phospho_Site (49-51) |
| 24 | 2029024 | Pkc_Phospho_Site (15-17) |
| 25 | 2029025 | 1E-34 >gi\|1698548 (U58971) calmodulin-binding |
| | | protein [Nicotiana tabacum] Length = 551 |
| 26 | 2029026 | 3′ Tyr_Phospho_Site (728-736) |
| 27 | 2029027 | 3′ Tyr_Phospho_Site (405-413) |
| 28 | 2029028 | 3′ Rgd (533-535) |
| 29 | 2029029 | 5′ Pkc_Phospho_Site (7-9) |
| 30 | 2029030 | 5′ Pkc_Phospho_Site (142-144) |
| 31 | 2029031 | 5′ 2E-50 >gi\|2829869 (AC002396) pyruvate |
| | | dehydrogenase E1 alpha subunit [Arabidopsis |
| | | thaliana] Length = 393 |
| 32 | 2029032 | Tyr_Phospho_Site (725-732) |
| 33 | 2029033 | Rgd (238-240) |
| 34 | 2029034 | Rgd (88-90) |
| 35 | 2029035 | Tnfr_Ngfr_1 (773-815) |
| 36 | 2029036 | Tyr_Phospho_Site (221-229) |
| 37 | 2029037 | Pkc_Phospho_Site (26-28) |
| 38 | 2029038 | 5′ 2E-69 >gi\|1351135\|sp\|P49040\|SUS1_ARATH |
| | | SUCROSE SYNTHASE (SUCROSE-UDP |
| | | GLUCOSYLTRANSFERASE) >gi\|436792\|emb\| |
| | | CAA50317\|(X70990) sucrose synthase [Arabidopsis |
| | | thaliana] Length = 807 |
| 39 | 2029039 | 5′ Pkc_Phospho_Site (77-79) |
| 40 | 2029040 | Tyr_Phospho_Site (452-459) |
| 41 | 2029041 | Pkc_Phospho_Site(43-45) |
| 42 | 2029042 | 7E-53 >sp\|P52780\|SYQ_LUPLU |
| | | GLUTAMINYL-TRNA SYNTHETASE |
| | | (GLUTAMINE-TRNA LIGASE) (GLNRS) |
| | | >gi\|2995455\|emb\|CAA62901\|(X91787) |
| | | tRNA-glutamine synthetase [Lupinus luteus] |
| | | Length = 794 |
| 43 | 2029043 | 2E-17 >gb\|AAD173971\| (AC006248) RING-H2 |
| | | finger protein RHG1a [Arabidopsis thaliana] |
| | | Length = 704 |
| 44 | 2029044 | 1E-60 >emb\|CAA05628.1\| (AJ002596) |
| | | patatin-like protein [Arabidopsis thaliana] |
| | | Length = 410 |
| 45 | 2029045 | Pkc_Phospho_Site (93-95) |
| 46 | 2029046 | 4E-93 >dbj\|BAA28828\| (AB015313) MAP kinase |
| | | kinase 2 [Arabidopsis thaliana] >gi\|4914405\| |
| | | emb\|CAB43656.1\|(AL050352) MAP kinase kinase 2 |
| | | [Arabidopsis thaliana] Length = 363 |
| 47 | 2029047 | Pkc_Phospho_Site (42-44) |
| 48 | 2029048 | 3E-55 >gi\|3461848 (AC005315) ATPase |
| | | [Arabidopsis thaliana] Length = 807 |
| 49 | 2029049 | 3E-18 >gi\|3851670 (AF099906) J8 |
| | | [Arabidopsis thaliana] Length = 109 |
| 50 | 2029050 | Tyr_Phospho_Site (166-174) |
| 51 | 2029051 | Tyr_Phospho_Site (1195-1203) |

The application's sequence listing, which the Patent Office published only in electronic form, follows.

SEQUENCE LISTING (999 sequences)

SEQ ID NO: 1 - DNA, 391 bp, Arabidopsis thaliana
agaaatataagagaattagtggagaaagaaccaacgcaaagtcatttggattacaaaagttgaaaaaaacatagcaaactgagttacgaaacacaaatcttctaggacacctttttaaggcgaaattgacaaatacagaagagaaaaaaatgtccgactgaaaagagttaaaagtcttttttttttccttcgtggcgggtgagggattaatttcaaggtgggtggtttatgtcctcttcataatgtatcccaaaattagaccgatgagtccgaccaaaagaacgtacatgaatgggataccaccactttggctctttttgctttcacgccttaactgatccagttctctttgaagtctgttgttcagttgaatggcagactgtttttcttc

SEQ ID NO: 2 - DNA, 391 bp, Arabidopsis thaliana
ttttttttcgtaaattttcagccacatccataaacttgactcgaatgaagattgacaacgactgtttttcaaacacttgttttgaatttccgtatattcagtctggaagtaaaaacacagtaagaagacaaagagaagcagccatttttcttggttcttttcttggtttaagcatcagatggtttctctgcggtttttccttccttgttaatgtgaaagccttcaatcttacgagcaacctcatccacactctgcttcggctttgactcgctgatctcttcaggattcaccggtccagtttgccaaattctgattgtaccatcttcagaccctgaagcataagactcacctgttggtgcaaatctcacacagtgaaccggaccatgatgtc

SEQ ID NO: 3 - DNA, 391 bp, Arabidopsis thaliana
ttttttttttttttttttcacatgcattgttcagaggttttgattccctccctccaccattacacattttcatgtacaatatatgttacaccatttatttgctttactttaatcgtaaaaacgctataattaatgctaacaaataaacagactataaaacctaagaaagagctaattaacaactaaacctttgtttgttgtcgatcgatgcttaattcaatagactaaatcatatatcgcgacttttgtcttcaacgaggagctacattagtaatggaaagcatcatctactgaacaaagagcggacgtattgatagatagacgatccactaatcctagtatcctacttgttcatgtttactactccggacgaaaaaaccaagtcgttgag

SEQ ID NO: 4 - DNA, 391 bp, Arabidopsis thaliana
ttttttctaaaatagttccataagaaaaacaagaatccagtagaagaaacaattgagtgagaaatctttcagaaattgggatacaaaattacaagctgtgtctgagaacaagttctacaatatcttctggatttaaaaacacaaaaggttaaaatcttgagaacagaccatgaggtgagaacaagcataatcatcattatcatctcgtgcctcgtctgcgccaatccctgtctctctctttgcttctatcattatcgtctcgatcgtggcttgaactcttttcacgtcgatctcgatccctgttcaaatcatgttgcctatctctgtctctgtgtctctctctatccctgtctctccccaagtcatgatctctctccctcgttgatgattt

SEQ ID NO: 5 - DNA, 391 bp, Arabidopsis thaliana
  misc_feature (1)...(391): n = A,T,C or G
cctctagagcggccgcccttttttttttttttttttcgagcgaggcaccaagcttctcattttttgccataaagagtcagattcatcggaattaattgcacaaaatgatgagaactcagaaagcatatttcttgccaataagccataaccaacccaaagaaattcctacaactgctcctcctaaaataaaaaccaccagcaaattccctaatgcattcttctccggacccttgtacccgttagnggctatagtcataatgcaaacagtgagatgtccagtagttaatcccaaaatagaaacgagcataatcatccatcctttatcaccatattttgcagtgaaatagaatgccggaacgaggaaataacgggtcaagaccgcaatcgttag

SEQ ID NO: 6 - DNA, 391 bp, Arabidopsis thaliana
  misc_feature (1)...(391): n = A,T,C or G
atcctctagagcggccgcccttttttttttttttttttttttttggtttaaaatactaataattattcacatcaaacaaccataattgtcatgattatgtttatagatcagctgagatcatgacagtaagtaatagcggtatacacactgagagataagaggacacacaccacaacatttaatagaggttccacaaacaaggttggtctaagaccactacaggccttcaccaccgtgagcttggcctagatttgcttccgccgtacaaacgaaagacaccgaaagccgaaatgcaagnnntcaaaaccattccaatgcaagcaaacaaagcgctcgcaattccttcacccacttggttacagaacttcccatacatattacaaatcttcat

SEQ ID NO: 7 - DNA, 391 bp, Arabidopsis thaliana
atcctctagagcggccgcccttttttttttttttttttttttcacacgaatgttatttttgttttatttaacgattccttagtttatgattttaaaggaacttgtgaaagaagttgtgaatgtgttgattgatcacgtcagggttttcttcgtgtaggaaatgtcccaatcctttgagcacgacggtttcgtctaacaatggtacatctctcttgaaaccgccaccgttgatgtattccttagcccccggaaaattgtacgtcaaatcctgatctccgattatgaacttcaccggtacacggatcttagcaccggtccatggtgcagtcagctcccaatttcggtcaatgttgcggtagtagttaatgggtccggtgaagcctttgttttc

SEQ ID NO: 8 - DNA, 391 bp, Arabidopsis thaliana
ctctagagcggccgccctttttttttttttttttttttgtttttttttttttttttttttttttgacccgaaaagaagtgtattcacatacgaagataaacagagatgtggcgtttacatcaaatgacaaagaaaatatccaaatccaatatgaagataatacctaaaaactgaactcttgttcaagtggcatcactattagattcagaacatggcagaaacccgcatcaactctgatcctcatgcatatggacttctgttttagcccgtgaatcttttctttctttttcttctacagaacacacaactcttctacagaagcaactcaattccataaccaacaaagaaccataatgttaccttcaaattctcagaaaacttcggacacttt

SEQ ID NO: 9 - DNA, 391 bp, Arabidopsis thaliana
  misc_feature (1)...(391): n = A,T,C or G
agagataaaagggaagaagaacaatggttttctcatccgtctcaagctttttagatccaccaattaattggccacagtctgcgaatccaaataaccatcctcatcatcatcagctacaagaaaatggaagtttagttagtggccaccaccaagtactctctcaccacttcccacaaaaccctaaccctaaccaccaccatgttgagacagcagccgccaccaccgttgatccgagcagtctcaatggccaggcggctgagagagcgaggctagctaagaactctcagccgccagagggagccctaaagtgtcctcgatgtgactcannnnntaccaagttctgttacttcaacaactacaacctcacgcagccacgccacttctgcaaagc

SEQ ID NO: 10 - DNA, 391 bp, Arabidopsis thaliana
aacgatcggggaaattcgagctcggtacctcgagcggccgcccgggcaggttatatcatcaatggaaattgcaagaatgttatgaacatgtctcagagtgatcaagaggatctatggacctctgtcatgaacggtgatcttgatgcctatacaagattatcacccaagcttaaaatgggaacagtcgaagatgagttttcaaggaaaacaagtttgtcatctccacaatctcaacaagttgtgcctgagacggaggtggctggacaagttaagacagcaagaattcctgttcggttgtatgttcgaagtctaaataaagatttcgagaatcttgaagatgtacctcggccgcgaccggcgcgccggatccttaattaagtctagagtcaat

SEQ ID NO: 11 - DNA, 390 bp, Arabidopsis thaliana
ttttttttttgtaggagaaaaatgcatagtatttgagattaagagtatgaagatgatgtacaaggaaaactcataggaaacatctaagtgtacatcatcttgattttgcttctctttgctctgactctgacccagaattgtgcaaatctatagctttaacactcttactggtttgatctctctagttatttatcagacaggaatacaataaacaccacactatatgtatgtacctatgtgggaaattacactaaagcagcctcctccacattctcagcgatcttgcctttgacaaatccaacataaaggtcacttccagttgtgtcttcttttgagagtctcctcccatgaccaccttccttcatgttcttaacaaactccactaactgc

SEQ ID NO: 12 - DNA, 390 bp, Arabidopsis thaliana
tatcaatttcttttaagttccacgcgaatgaaatagtgcttttcaatatttcattacatttggcgagagagaacattacaatgaaattgcagtgtcaaagtaaatcttctgtacatgtttcaatcaaaacctttttctttctttcttccttctctttgagagcaaacatcataaatccacaaaacaatcaaactcacccaaaagacttccacgatttgactcagcacacagtacttatgttcaattctattgattcgatctcgtgaggcagggcaaagcaacaagccagatgatgtttcatgttcctttttggtctgtgccctttgatgtaatcttagacttgagtgctaagctacttatatcgtcgtctccttcaagatcactgaaaga

SEQ ID NO: 13 - DNA, 390 bp, Arabidopsis thaliana
tcgagcggccgcccgggcaggtaccggtcggttaaagtctcatctctccaattcgcaccgtactgaatcttccagagattaccggctctgtatgggaacggagtcaccgtagatgatatcctccccatctcaccaccgtatggattgaaagccattgtcggaatttcaagctcgatcattttcttccaaattgactctaaaccggttcttgaaatcggttcacgtacgtaatctgatttcctcttgaggtagttcacgggttgattcctttggagtagaagtgtctccgacgaaccaacttgaatatttgtccagaatagcacagattggatccagcttgtttcggtacagtcagaccggaccaaacccaattctgggaatctccggttt

SEQ ID NO: 14 - DNA, 390 bp, Arabidopsis thaliana
agcgtggtcgcgaccgaggtcttcaattttcttgtgaaatggaagtttcagtgattggaaatcctcaagcgaggatctgcagagcagaattagcttacagagagcttggatttagatttggctctgatgtaatctccggtgaatcgagaaatagggttagtttctgcaaccaaagctcgaaatggaaagagatcgcgattcgttgctcttcgagatctgtcaaatgtgaagccatcgtctccggtgccgcttctccgtttctcaaatccactccaaaatctaaatcgctcgagagtgtaaaattatctgttgggcttccgttagacacagtttcagattgcaacaacgtgaatcacttgaaagctattacagctgggcttaaagctttga

SEQ ID NO: 15 - DNA, 390 bp, Arabidopsis thaliana
atgattcacatattaattgaaccataacacatcattcttgggtgcataaacacaaatcaaacaacaacaaaattaaattaacaacatttgttttttccgaaagtcacacaaaacaacaatgaccataacacaccacattccgaccctgaagcttactaacttccagcgacagaacaccgtgtcctgatcacaccagctgagccagtcttcactttaactctccccatcttctccattgacttagcaaaagctttgaaaaacttcttttcagaaccgttgaccaagtcgttgatcaccttcaaagtcgctgagttcgttgttaatgcagaatcagactgaaacaagcctctcctcttcaagacaagcctataataactgagatcgaagctt

SEQ ID NO: 16 - DNA, 390 bp, Arabidopsis thaliana
  misc_feature (1)...(390): n = A,T,C or G
gcgtggcggtgaccgtggtgacttcgggcgtggattcggcggtggacgtggaggtggccgtggccgtgatcgtggtccaagaggccgtggaagacgtggaggccgtgcctcggaagaaacgaaatgggttccagtgaccaaactaggtcgtctagtggctgacaataaaataacgaagctagagcagatctatcttcattctctcccagtaaaggagtaccaaatcatagatcatcttgttggtcctacgttgaaanacgaggttatgaagatcatgcctgttcagaaacaaaccagagctggtcaaaggactagattcaaggcctttgttgttgntggtgatggaaatggtcatgttggtttgggtgtcaagtgttctaaggaagttgc

SEQ ID NO: 17 - DNA, 390 bp, Arabidopsis thaliana
aggaaggtctaaagattcaatctttggtcatttatccgatcaaatcttgccgtggaatctctgttcctcaggctaccgttactcatactggttttcagtgggaccggtattggttagttgttaactataaaggaagagcatatactcaaagagttgagccaacccttgctcttgttgaatcggagttgcctaaggaagccttcttggaagattgggagccaacaaatgactcattgttggtgataagagctcctggtatgagtccgttaaagataccgttgactaggccaagctcggtagcagaaggtgtgtcgatgtgggaatggtctggctctgcttttgatgaaggagaagaagctgcgaaatggttttcagattatcttggaaaac

SEQ ID NO: 18 - DNA, 390 bp, Arabidopsis thaliana
tgagcgaaaatggtgaaagcaactaaggcagagaagaagatcgcctacgataccaagctatgtcagcttatcgatgagtacacccagatcttggtcgttgcggccgataacgtcggatcaactcagcttcagaacatcagaaagggtcttcgtggagactccgtcgtgcttatggggaagaacactatgatgaagcgttccgttaggattcactctgagaacaccggaaacactgcaatcctgaatctgcttcctctccttcagggaaacgttggtttgatctttaccaaaggtgacctcaaggaagtgagcgaggaggttgctaagtacaaggttggtgcccctgctcgtgtgggtttggtggctccaattgatgtggttgtccaacct

SEQ ID NO: 19 - DNA, 390 bp, Arabidopsis thaliana
  misc_feature (1)...(390): n = A,T,C or G
agtgtaaacgaaagtttataaatttcatttctgtgatcttacgtaattggaggaagatcaaaatnttcaatccccattcttcgattgcttcaattgaagtttctccgatggcgcaagttagcagaatctgcaatggtgtgcagaacccatctcttatctccaatctctcgaaatccagtcaacgcaaatctcccttatcggtttctctgaagacgcagcagcatccacgagcttatccgatttcgtcgtcgtggggattgaagaagagtgggatgacgttaattggctctgagcttcgtcctcttaaggtcatgtcttctgtttccacggcggagaaagcgtcggagattgtacttcaacccattagagaaatctccggtcttattaagc

SEQ ID NO: 20 - DNA, 390 bp, Arabidopsis thaliana
ttttctttccgatcagagattaatggcgactctagactccgacgttaccatgattcctgccggagaagcctccagcagcgtagccgcgtcgtcttccaacaagaaagctaagcgattcgaaattaagaagtggagcgccgttgctctctgggcttgggatatcgttgttgacaactgtgcgatctgcagaaaccacatcatggatctttgtatcgagtgtcaggctaatcaggccagtgccacaagtgaagagtgcactgtagcttggggggtttgcaatcacgccttccactttcactgcatcagcagatggctaaagactcgtcaagtttgtccattggataacagtgagtgggagtttcagaaatatggtcactaaatcaacaaatg

SEQ ID NO: 21 - DNA, 390 bp, Arabidopsis thaliana
ctttttttttttttttttttttttttttgcgaaagcgataatgttggtggattagtgaaaaatacagctgatattacacattgtgcgttgtattatcgtactacaagcaaaaaacttcaaaagggatatttttggagttggatgttgtctgtcatttcttggccagtaatttctttgggagcttatcgagtggcgttgatttaagtaaaaatagcctcgcagctcgctctcgcaatgtccctccgcacttcagaccacgtgactgaagctcagtcttcaatctctccatccccaaaacctccatgtctgctggtgaattgaagtcatcaaagttaagtggttcaacaggtttgcaacatactgcatcaacagacactgtttctttcgcag

SEQ ID NO: 22 - DNA, 390 bp, Arabidopsis thaliana
agagaaagagagaggaaagagctccaaaaaaaaaaacatcttttcttttcattttcaattagtttcattattatcacaaaagacttttcttctccgagagaacaaaagattatagagctgagtgactgattggtggtttcttggagttttaatgggaggttgtttcagcaatcggattaaaacagatattgcttccagtacatggctaagttcgaaattcttgagtagagatgggagcaagggctcgtcgaccgcttccttctcttatatgcctcgaacagaaggcgagatcttgcaaaatgctaatctcaagaactttagtctcagtgaactgaaatctgcaactaggaatttccggcctgatagtgtggttggtgaaggtggatttgg

SEQ ID NO: 23 - DNA, 390 bp, Arabidopsis thaliana
ttttttttttttatcaataacaatgattaggttaatacaaattagaatacatggtggatgatacaatacaaatacattgcaagtttacatattattccttcacttatattatactttggaaaatctccagtagaagctaaagctctctggcattattcttcttttaagccaagtttatatgattctttttttacttcctgcacacgataccgtaaccagaagacgctccacgggtacaatccaaagttgcatattcaatctctgacttaacagaatcaatctctgcttgtgactcagagaaaatgcaagttttacagtcattggagagtagagaagaagtcttgaagctgtcttcaccaccaacaactggcattgcgactccaggcttag

SEQ ID NO: 24 - DNA, 390 bp, Arabidopsis thaliana
ccacgcgtccgaacataagccaatatctctgcatcggaagattctcagcgacatctttccaagttctaggccacatgaaaacagtatgcgtcctcacattaggatggcttctctttgattccgagatgacattcaagaacatcgccgggatggccatagccattgttggaatggtgatctatagttgggctgttgatatagagaaacagaggaacgcaaagtcaacgccacacggcaaacacagtatgaccgaagatgagattaagctactcaaagaaggagttgagcatatcgacttgaaagacgttgaactcggtgacactaaaccataagtgggtgcttataacccatttgaaattactcgtcgctactgattcgaattctttatac

SEQ ID NO: 25 - DNA, 390 bp, Arabidopsis thaliana
catcaaataaaaggaccatacagaaattctacttgttgaatcacatatctaagactgtagaatcagttcttaagaatgctactgtctaaatgagttatcatcaatcaagcatattagaagtctcctgcttcataaaacacacacatccacagatccactgaatctaactgtacacttccttttatacactattcgccatcttcatcatcatcatcaagctctacaatttgtgctcgcctctcagcagctttcctcctgatgaagaacccccatctcattgcggcttttatcttaagccatccaacaacagctctgcctgatcgaccacggtcttcatcataaccttgcataggcgtgtgtagaaacgatgggaaagtatatccatcttct

SEQ ID NO: 26 - DNA, 390 bp, Arabidopsis thaliana
ttttttttttttagaacgatcaaatgactgtatccatgttgatgcccttcaaccccattcatctccatcatccaccgcgttcacaaactccaacacttcatccacctccctatccatcttcatactcgcactcgtcacctcatcccctcccacctcattccccacccgaatcggctccaacctgccctgcactttaccccttccacccaccatgacctccattgacgcgcgggatgagggggtcttgggcttgcggaagatggagagtgaaggggtgggtgagtggcggggtgaagtgtgagtggagtgatggggtgagatggagatgatggtggtggtagagatatgaggcggaagtgcaggcaacgcaaagggcacagactcattagc

SEQ ID NO: 27 - DNA, 390 bp, Arabidopsis thaliana
  misc_feature (1)...(390): n = A,T,C or G
cctctagagcggccgcccttttttttttttttttttttttttacagtttttaaagtcactaagccaatcttagctttagactgtcactttaatgtgcacaaaagtacaaatttacagaatnnnngggctgaaacataccctgactctgtttctctcttataaaaccaatagataaaaagcgtcttaaaaaccatcagcgataacctcttttaggttgaatcagcagcaacctcttctcatctactacttaaccttagcttcttcttcttctccattaccaatgcctctgatttacagattgggcaaacgttcttgataaccaaccacttcttcaagcattctgcatggtatttgtgcatgcaatccagcgttgcgatcttatcttcgttt

SEQ ID NO: 28 - DNA, 390 bp, Arabidopsis thaliana
tctagagcggccgccctttttttttttttttagtggggaaaactgatattcaatttctcatagagagtgaactgtacacagggaaaaatgaataacaatatatctcctttggatttacagtggatgttgtccttttatctacgcaaaagttctttgtttcatcggttttttagatgaatccacaaactccagatcttttactcggcaaagctctttcttcggtgagaataaaccagattaataacctacacttgtctgaggttgctggtgaataaggagctgcaaaaacttccattagatttctttaataacagttagccggagaaaggtagtttatcatcgccacgatctactgcgttcctccatagtctataccgaactccgagcttg

SEQ ID NO: 29 - DNA, 390 bp, Arabidopsis thaliana
  misc_feature (1)...(390): n = A,T,C or G
tggagaattcaccgagatacagagaagcgacgaatctgattccgtcgccgagatgtcacaacagcaacaacagttgcggtatgagcagtagcagtgaaagtaacaaaccaccaacaactccgacccgacacgtaaccacaagatccgaatccggtaacccgtacccgacaacattcgtnnaagcagatacttcttccttcaaacaagtcgtccagatgctaaccggatccgccgagagacccaaacacggttcatctctcaaaccaaacccgacccatcatcaacccgacccaagatccactccttcttctttctcaatcccaccaatcaaagccgtacctaacaagaaacagtcttcttcttcagcatcagggtttcgtctctacgagc

SEQ ID NO: 30 - DNA, 390 bp, Arabidopsis thaliana
ttcttcttctttttcttcagaaacagttattttgacttgaaaaaccagagctttaatcctggattcatggcaaaaagagcattacttttcttttcctctctcactttcttgtttcatttggcttaaaaattcaatgataattttgtatttgggggaaagaagaagaagaacaagagtgtgtgattgattcaattcttaaaaatgacattttggtgtatgtcaattcttctgattgttgggttcttatcaaaatctgagctttgtgaagctcaactaagcgatgaagccacattggttgcgattaatagagagcttggagttccaggatggagtagtaatggcactgactattgtacttgggttgggcttaagtgtggtgtcaacaactct

SEQ ID NO: 31 - DNA, 390 bp, Arabidopsis thaliana
caaatcggagagcttcggcgatggcgttatcacgactttcttcacgatccaacactttcctaaagccggcgattaccgccttgccctcctccatccgccgtcatgtttccacagactcatcaccgatcacaatcgaaaccgccgtccctttcacatcgcatctatgtgaatcaccgtcacgctccgtcgagacttcatcggaggagatcttagcctttttccgtgacatggctcggatgaggaggatggagatcgcagcagattctctttacaaggcgaagctgatccgtgggttctgtcatttgtacgatggtcaagaggctttagcggtgggaatggaagcggcgattaccaaaaaagatgcgattatcacatcgtatcgtgatcact

SEQ ID NO: 32 - DNA, 389 bp, Arabidopsis thaliana
  misc_feature (1)...(389): n = A,T,C or G
cttttttttttttttttttagtagaattatcagcaattatttgggtagctgtaacgaagagcgaaaaacaatctggttgtaacacacatatatgatgttttgtaattacttgtcaaaagagaattgttcctctagctagctaggattaatctgaagaacatatgcagttaatagatgatgaagttgtgtatactatagcaatctcattaattggcatatatgaacgaagaaggtcagagcttggggatatagtgagcgtcactccatgaacgcccgcactcaacatnggggctccaattgctgttgacatgggaggctttgtagcgtttccagtcacgaagaacaagagttagatcagagatcttagcaaggatgtggcggcaacagtt

SEQ ID NO: 33 - DNA, 389 bp, Arabidopsis thaliana
attgcgccggcgttttcgtttcaccgtttaccgtggggacatgtgtaatgcggcgacgtttaacaaatccacagtttggtattgagatgtcactgtctcaagcaaccagagggtcagaacgtttcgcaggacatgtgtcatcgactggttcatcggtcggttcacgaacagggtcatacgaaacttcgttctcacagatcgaggaacaggaagatcctgatccttttgcctcacatgaggaggaaccgtagcattcagtagcacaacattctggctcagagttcggcttggattccattgatgtgtcagcatcttcctgttcatcgtcagaaatcgaaactggttcttaagattcaagaagacacgggacagattcgtgaacctcttga

SEQ ID NO: 34 - DNA, 389 bp, Arabidopsis thaliana
agaaattatgagaaagtgaatttaatcaagtagttatgagttaatctgtttatcatgagcaatatttagtacaaaaaatataacatatgataagcaaaatatggttgttttcaaagagagttggcgaaataaatgtaaatataaccaaattaatgtgcagattaatatagagagacgagttggaagaggagatgctaaggaagttatatgcaacgcagttcagaaacttagagttgatatgttagtaatgggcactcatgactatggcttcttcaaaaggtaaggtttcaatctcttataagaaacaaaaatattttggtttaatggttatttgataatcatttgatatatttgatagggctttgctagggagtgtgagcgagtattgc

SEQ ID NO: 35 - DNA, 389 bp, Arabidopsis thaliana
caaaccatcagcattgttcttagatgcagcatctatcaacagatgagatgagacaatgcgtttttgcaactcatataacataacattgtatgcaatacaagcaaacacaactcaatggttacaaccatgtgatgtattgatattcggtcctgcaagcagaaggtgaacgctgctttgaaagatatacgaaacaaaattggtgtgcggcgcgtatgtgatgagttacacaaagcagtacatagcattagtaagcaagatattgtacaaatatggaatcagatagcaaacagtacagtcgatgagtactaagctcagtgcagtcaatgccattgcactgaatgctcagatacgtgcctagattacatctgttgtaactttgctcagctcag

SEQ ID NO: 36 - DNA, 389 bp, Arabidopsis thaliana
cgcggccgaggtacttgtccacgttgaattgcgagaacaatgacttcttgctctgcttcttgaaattcttccacgccttgtcccagtccgtcgacgctttatcaccaccaccacctgctataaaccaaataaaaccgaatttaaccgattataatctaccaacgaacataagcttcgagatcagactctcaccgttggactcgtttccctttcgaggaggttcgttgttggagcaacggaatctagaggaagatgagaatctaggggttatccggattagattggaggattttaagccggagattcgaacagaaatgtccattttccgatttcggtacggacaaaataagaagaaaaagtatctgacacctgcccgggcggccgctcga

SEQ ID NO: 37 - DNA, 389 bp, Arabidopsis thaliana
cggcgctcttcctcttcctcttctaaacaatgacggaggaagaggtagctatggaagtggaagctctagaagcagtttacagcgaagactgcgttatactggattcgtatcctcctcatcttcacctccatatcaagccccgtaccgccgaaatctcttctcagcagtttgtggaagccgttgttagattccaagcaggttctaagtatccagatgaaccacctcggattagtctgattgaatccaagggtcttgacgagcaaaggcaaaagcttttgattggcatagtgcaagagaaagcttctcaactatcatcttctttaatgcttgtagaactttgtgaggaagcagtggagaggctcacaattatgaatcacccggagggagat

SEQ ID NO: 38 - DNA, 389 bp, Arabidopsis thaliana
  misc_feature (1)...(389): n = A,T,C or G
tggtgttcaacgttgtgatcctctctccacatggttactttgctcaggacaatgttcttggttaccctgacactggtggacaggttgtttacattcttgatcaagttcgtgctctggagatagagatgcttcaacgtattaagcaacaaggactcaacattaaaccaannattctcattctaactcgacttctacctgatgcggtaggaactacatgcggtgaacgtctcgagagagtttatgattctgagtactgtgatattcttcgtgtgcccttcagaacagagaagggtattgttcgcaaatggatctcaaggttcgaagtctggccatatctagagacttacaccgaggatgctgcggttgagctatcgaaagaattgaatggc

SEQ ID NO: 39 - DNA, 389 bp, Arabidopsis thaliana
tgagtctgtggaattcgatggtggaagaagcagatcaaatgcaagattcctctgttgatcgtgacatgagattgagacttgtttcaccgatcactgcaaggattgaattggatgattatgccaattacactagaactgagcttttatataagataggtttggctcaagagcctgacaatcatctgctcctagctaactacgctcagttcctttacctcgttactcaagaccatgagagagcggagaactgcttcaagaaagcaatagagtcagaagatgtagacgcagaaacgtacagcaaatacgccatcttcctgtggaaagttcggaatgatctctgggctgctgaggagaactttctagaagctatatctgcagaccctaccaac

SEQ ID NO: 40 - DNA, 389 bp, Arabidopsis thaliana
  misc_feature (1)...(389): n = A,T,C or G
agaccctctgttcccagtcgcttgttcaaggcttcattccacatgttagcagcatactcaggctgcatttggctccaaacagtcatgaaagatgcaacaagatgggcatctagaggaggcgggtagttttcactaacggtatcaatccaactaaaaatcaagttgtgataaccatatggtttaccctccatgctgcgagcatatttccaagcannagcaacatcaaatttagcacgaacatcgggatgcaaaggtagcagtgcaatctgaggattcgagtcatcctttgtttgttcaaatgcccaccactcctcccatggtaagattgctattacatcttctcccttatcattttcatttcctgactcaccaacccaaagtttcccttc

SEQ ID NO: 41 - DNA, 388 bp, Arabidopsis thaliana
ttttttttttttttttttttttttatgattaaactgtcattacagggacacatgcttctttatgataaaattgtcattacatactgcattatcctggtgttttttttttgtttccttcccttaaactatgtaacaaagagattatttaactttctagaagattgcacctaccacaagctctgttatgagttcatctgtcagcattacctcaatctctctacctatgatttcaatgtcatcttctaaactcagccactgcaactccttctcctccacatcatatttgcttggtttctcgtcttttcttgtgaccaaatctcgcagagtctcttgtatcttgtttgcatcccatttcgggcatacctttgtggatttaacccaagggtgt

SEQ ID NO: 42 - DNA, 388 bp, Arabidopsis thaliana
ttttgattcaagaaataaaaaaccaactgttgtacaatgtgcgtatcaaaccaaacgatttcatttactgttgttataaaaccctttcgggggaattttgaccaacaaaatgttaatatgggtggagtgttttactttccacctttcccgtagctgtctctgagtgtgaccgtccggttgaacacaagctttcctggctcagagtccttgtccaccgcgtaataacctagcctctcgaattggaatctgtccccaactgcagcatctttaagggttgatacagcataggcaccagaaattaccattttagagtttgggttaatgtcagtgagccaagcatcattgagttcagccgggttctcggagttaaagagtttctcaaataatc

SEQ ID NO: 43 - DNA, 388 bp, Arabidopsis thaliana
gtttcaggttcaaatcaaagtcgagcttttaatacagaaggagaagaaaatggtcacctgatcttatttacccatttgtacccaattaggtcaaaagaaagatactgttatatgtacaaaagaaaagagaagagagagcaagatgatgtagagacaagcacttggtgaagaaaatagcaatgtatctgcatcatcttggaatcatcccacaaagctaaaactgctgttggcattattcactaaatcgacttctcttcttccgcagaggttttgcagattgggcaccaattcttcatccgcagccattgttgtacacagctcacatggtacatatgttgacatggaatagtccctaattcatctccatcaacatactcttcctggcaaa

SEQ ID NO: 44 - DNA, 388 bp, Arabidopsis thaliana
ttttttttttagataaccaattttatttaaaaaatttcatctcacagcatataaagtaatggacgtcaccacgtaaaacatatgcaacaaacaatttcacacaaaagcacgaatgatttccttttattttatctcttgtgattcatttgatgaatctttaatcattgtgtcgcttcttagtctccttaatttcctttcgtccgagagaatttttgcatacctctttagctgttcatcattggtaatattttcagcaacaggttcatatacaccagtgtcgatgttcatttgcatgactctgtttgtcagcatcttctctccaatcttttgaagattctccaagttagactttgtcgctagatccatagtgcttacatctccttccaat

SEQ ID NO: 45 - DNA, 388 bp, Arabidopsis thaliana
actagttgtccgaacccgaagaagccccaatcgctgatgcaactgtctaggagccgccacgctgcgaagaagctctagggtttgttcgtcttcttcctcggtttcatcagaactcaaaaggtacttggtaggagcgagaagaaagtttctggagaattgctgaattgtttctttcaatggttttgtttctaagatggtaatcaagattgttgacggtgctctgaagatctgttgacctgctcagagtttgcttaaaaagtttgagaaaaaatggacgatgataatgggctcgagctcagcttgggtctttcttgtggaggatcaacaggaaaagctaagggtaacaataataataatgctggaagctcctcagagaactacagggcag

SEQ ID NO: 46 - DNA, 388 bp, Arabidopsis thaliana
ggtggattcagcaataatctcaagctcgcaattcctgttgctggcgagcaatccatcaccaaattcctgactcaaagcggtacgtttaaggatggagatctacgtgttaacaaggatggagttcgaatcatttctcaattggagcctgaagtcctgtctccaattaagccagctgatgatcagctgagcttgtcggatttggatatggttaaagtcattggcaaaggaagtagtggtgttgttcagctggttcaacacaaatggactggccaatttttcgccttgaaggtcattcaactaaatattgatgaagcaattcgcaaggcaattgcacaagagctcaaaataaatcaatcgtcacagtgtccaaatcttgttacctcgtacc

SEQ ID NO: 47 - DNA, 388 bp, Arabidopsis thaliana
ttctgaaccataaaagcttctctcgactttcaaaaactctctcctttttccttttagccatttcaagcagagagattgatcgaagaagataaaaacctcgtctttcttcaatctcagtgattctcaaattacccatcgcttccttcttttgatctctttgatttcacttcaaaaagcaaagaaatctcgattaggttattccttgtttcaccccataaatttgcctccttttttttggtctcgggaactactctgatttgtttcaatcgattctggatttcgggatttggatatagagctctctgtttttgacattgcctttggaactaaaattctcagtctttgcatttttttgattcaaaagctcactaagtttgggtttcagaag

SEQ ID NO: 48 - DNA, 388 bp, Arabidopsis thaliana
caataatttagaaaacaaaaaatgttcattgctaacaaattccgtcgtcactaaaaacattgaagaacaagagaatgctttttttgaattgtgttattgcatacttgatcaaatttacagttgtaacagtgacgtttctcttacgtcggaacaacctggggttcaaacggcgggggagctccatcatccaccacaggctccactgtaggggtggcggctgagtccttctcagtctcttcaaacccagacttgaaccggtcataattagtgacctcagctgacttaaacggacgttcacctaaaatttttaagagatcatcctgatgcaacacctctttctctagtaaaagctcggcgatctcagccactttcactttgtgttcctcac

SEQ ID NO: 49 - DNA, 388 bp, Arabidopsis thaliana
ggtcgcggccgaggtaccccacaattgcttcctctacaaacatcaggatgatactttttagcgagttgtctgaaagctttcttgacctcgtattcagatgaatcgggtcggatcttaagagtcttatacggatccattacagaagatgaagaagaacaaacgacttttgatctgttgagcatcttcgtgttctttcttctgctgttttttaatcgaaacgacgaagatgatgatgaaaacgacgatcctggtagacccgaaaacccgtttcctccgatcgttaaagcaattgtcatattttcttatgccggtggttcacaagatggaatcaaagagaagattatggtttgtaaaagaaaactgaaataaaggagagttttttttttgt

SEQ ID NO: 50 - DNA, 388 bp, Arabidopsis thaliana
aaggaagaagaagaagaggaacgatggggtacgtgtttagagtacgattggcttctttcttcgccggagctgcgactgcgtcttttatcggactctccgttctctacaaggattacaaagtcgctcacgaatcgatttctcagcaggcgaagtcttttcatgactctctggatagaaggatctctactcttgaaagcttgagacaaagtgaagctcctcagcttgctgagacaactgaatagtaatctgtctcgacattgaacactctgcttggcaatgatgttttgagttgagatgctcttttttcggttttatgaataacttggaagttcttgtatgactctactgttataaaacaatgaagtttaaggtaaaaaaaaaaaaaaag

SEQ ID NO: 51 - DNA, 388 bp, Arabidopsis thaliana
  misc_feature (1)...(388): n = A,T,C or G
acataaaatttaagcaatatttatgaaaaacactaaaaacagatatatgaaagtttcaggactatatttttatataaggaatatagtccacagtattcttttttttttaaattacttttatttaaaagtcttccagtatatagtttggcttatttttctttgtaatgaagggaattaacaaaaaaaaaagattcagatgatccagttgctatcatccttaatctctgtttcctccnnncatatttgctgcacatgttcccacacaaacccttctccttcctttgaggtgaatttgacagttgttgtgcaacatttcctctcatccccantctgctcccatttatcaagctttactatccaagtccctggagttgtgtctgttgccaag

SEQ ID NO: 52 - DNA, 388 bp, Arabidopsis thaliana
gaacgatcggggaaattcgagctcggtacctcgagcggccgcccgggcaggtacaaaccggaaatttcaaactggatcaacctaatcggattcgttgaacaaccagttcaattcggtccttgctccgatggaaaattctgggctggaacagttatttctcagcgttctggttcaaaatcatctaatttctggattccgattatattcgaaggagatttagctaaaattgcagttcaacatgtaaagaaagaagatcggattcatgtttccgggaagctgtttattgattcgcctcctccaaatgtgacatattctcaatccaatgttcaggttatggttcagaatcttaacttcgtacctcggccgcgaccggcgcgccggatcctta

SEQ ID NO: 53 - DNA, 388 bp, Arabidopsis thaliana
cgccctttttttttttttttacaaaatagaaaacccctctttatgtatgtaagtacaaataaagttttaaacaaaatgttacacatgatttggcgcattgaagtaacttgcatcttcggaattaactagagaagttatatcctcccaacttattgtactttgatccgccgatgtactcgttgtccctccggccaaagctgctcggacagcggctccggctactgaggcgtctccatagacttttgtgttctcgatggtctcaagattcactatgttgttgttgttgttgttgtttatgaacatatcgttgattgcttctgtctgaaagttactgctcccaaaccattgaagaatctcttgctgttgacttggatgttgatcactactt

SEQ ID NO: 54 - DNA, 388 bp, Arabidopsis thaliana
tttttttgatcaaagaatcttcttaatgccctgatatgagcttgttttacaaagaactacagtacatgcattgtttacatcagtgttatttgaatcaagctgaaacatcttcctcttcaacagaggagaaaaagacaattgaatagtgttttttagagacttgcacattaggccaataactcaacactaatcacttccagctgaactttaggttgagactaaaaaaccgggttcaagtaaggctaacttcccgcataacctttgctacatcctctgggaaaacagggtttatgtaacaacctgtgccaatctcaaacccacctaccccagaaagctgaggtacaatctgtaagaaccagtgcgtataaggtaattgtgattctgtaac

SEQ ID NO: 55 - DNA, 388 bp, Arabidopsis thaliana
  misc_feature (1)...(388): n = A,T,C or G
gcggccgctataaataaacgtacttcacgtttttttatataacttcaaagtagtttcagatttgtctctatctcttcacttttaagtcttctggttttgtcatcaccagctttttttgttctgtctctgtctttctctttgtgtatttttattctcgtcatcgttgttcttctatgagaggaagatcggaatgtcgaagagaattagaagattctcgtacatcacttcgttggaatttcacaggtcnnngagagatctgagaactgtttcattttgatccaaactcatctctttcagagtataatggactaagcattttttttctccgaagatggttaaagaaatagcttcttggttattgatactatcaatggtggtgtttgtttct

SEQ ID NO: 56 - DNA, 388 bp, Arabidopsis thaliana
cctctagagcggccgccctttttttttttttttttttatcttaaaatccaaaaagccattataaggtttgcttaaacgagcattcgtcctccaaacacactggaaagctataataataataatccataaatgtctgagaaaaaacacaaacgatgcagaatataaaaagtaacctaaaggtaaagcaaattccaaaacttgacagagattcttcaacggatccagcatctgttttctcttgtttggtttcatcaacgcctgtcggtttttcctttccctctcttgcctgaaaacaaatgtttcggtctaagcgttggtataactctgtcagcttcaccacgacgtgcattcttgtctctctttttgtgagatttattgctaatcttaa

SEQ ID NO: 57 - DNA, 388 bp, Arabidopsis thaliana
gaccaaacttcattcaacaatggtaggttctcaactcatgtacagaagtgcacctatctaatttttttgttgcatcacattcatgatgttcccttattgtatagtctgtctgcaaacaaacacctatcagattcttctctgctttcggctgcttgccttggctttttacacttccactattgcatctgcttattcttcaagacttggtggcatgactcaacaatttgtcacctccattcatttgccacttgaaacaccttcccgttgtatggcaaccacaggctcgttacatctaagacaccggaacgatgctgctgaagcgcagcgggtccttatgcagtagtaacagtacctgtgctgacaaggcagagctataaacggaattgca

SEQ ID NO: 58 - DNA, 387 bp, Arabidopsis thaliana
ttttttttttttttttttttgttttgaattgatattttagaagagttttgagttccacggtacacacaatgcttgtttctctgaactcaactgcaaaaagctaagaagctcaccaagagaagaaaaaacaaaagctaaagctcgaaaatgtcagacccattgacattcaatctaaagatcatactaatacaaaagcatatcggcactaaaggaaggaatacatgtagacatgcaataggtttaatctcccctttctaacttgtttccattgcctctttgtggtacttgtccaattcagcatcaagatcctctgcagatacgttttcatcacgtcctcttccaccactgccacgaccaccacgtcctctagctcccctgccacctctg

SEQ ID NO: 59 - DNA, 387 bp, Arabidopsis thaliana
  misc_feature (1)...(387): n = A,T,C or G
cgagcggccgcccgggcaggtggcgctttgctttattagagaggaaggaacgaaccatcatagaaatctctccctcgttcaagtttttctctactgtgttggttgagcaatcgagtgatggttattgcggtggcgacgacgagctccattgtttccggaatcaagctttcagggatcttaacttcgttcaacgccgtagatgatgcgtccagtagttgcggaagaagnannnttagaatttttccgacattgagtcggcgacnattctcatcgatcggagctgtgtccccaattcgtgggcatgcccaatcttcctttagtcgcagctctttcgtttgtccccagaatctcggtttgagcggtggttttagtacctcggccgcgacc

SEQ ID NO: 60 - DNA, 387 bp, Arabidopsis thaliana
aactcgtggccggagcttacgggaacaaatggtgactatgcggccgtggtgatagagagagagaaccccaccgtcaatgctgccgtgattttggatgggagtccggtgaccgcagacttcaggtgcgaccgggtcagagtttttgttgatggaaaccgtatcgtcgtcaaaacccccaaatccggctagacttgtataatttctatattcataatgaaaaagctatagacgagtcgtggttggttagtaatcaatcatgtaaaataataatcgtttgccttcataatttctgtgttactgatgcctaaagttatgaatgaaaatagtatcctatatttcaaaaaaaaaaaaaaaaaaaaaaaaaaaaaaaaaaaaaaaaaaaaaaaa

SEQ ID NO: 61 - DNA, 387 bp, Arabidopsis thaliana
ttgaccgcataaggatcatatctatctccatctgaatcatcttcctccagaagttctaaaagaaaggcttcctggaatctctgagaccgctgccatctttgctggtgttgatgttaccaaagagccaattcctgtcttacccacggttcattataacatgggtggtatcccaacaaactaccatggcgaggtagttaccatcaaaggcgatgatccagatgcagtgattcctgggctaatggctgctggggaggcagcttgtgcatctgttcatggtgccaacaggcttggtgcaaattcactgctcgacattgtcgtatttggtcgtgcttgtgcaaatagggttgcagagataagcaaaccaggggagaaacagaaacctcttga

SEQ ID NO: 62 - DNA, 387 bp, Arabidopsis thaliana
ggtcgcggccgaggtacactgacatgaagaagacgattcaaatcctcctcttcttcttcttcctcatcaatctcaccaacgctctctcaatctcctctgatggcggcgttctctccgataacgaagtccgtcacattcaacgccgtcaattactcgaattcgccgaacgaagcgtcaaaatcaccgttgatccttctctaaccttcgagaatccgagattacgaaatgcttacatagctttacaagcttggaaacaagcgattctctctgatccaaacaatttcacttcgaattggatcggatccaatgtctgtaactacaccggagttttctgttctctgacgcttgataatcggaagattcgtacctgcccgggcggccgctcga

SEQ ID NO: 63 - DNA, 387 bp, Arabidopsis thaliana
tactgtaaatctcgagttgattcatcatttcgatagttgcatcaagatcacaagtgttagccaagtaaacatcattgatagactcttgtgaaagaccagggtatgtagctaatagatactcaatatccatgtccatctccaaatcctcatccttcagctgatgattgtataccatctcagatggtgacttcttaggtgacatttgagttccttgataacttcccattccttgaactccatacccataataaggttgttgctggtggtgctgctgctgcatgtgttgttgtgtgacaggctttgtatcaaccaaagaaccttctcttttcgagagtggtacataagctgctgcgtaaggattcaatgtagaacttcctgacttcattg

SEQ ID NO: 64 - DNA, 387 bp, Arabidopsis thaliana
tttttttttttttttttttttactaagatacgatatgattaactctcattaagcaatctatttctatatatctgtttgttctttctttgtatgacaaaagtacaaaagaatgggggatgtgaattactaacctaagctgaaccaaaaaaacaaaacctcaaaagaaagaactaaaagatactctatttgtgtctatattatacgtgtaacatgttccattgtgtgagaccactaactataagtgtggagcaaacccaaagtgtggcagaagctgtacagtgagaggagaacgaagatgtcgcctgtttttttccctccgttctatggcaatttgcacgactcgataacttccataaccactttatgtgtttctggaggaatcatgtc

SEQ ID NO: 65 - DNA, 387 bp, Arabidopsis thaliana
cttttttttttttttttttttttttttttggtagaaaattttcaattaatcggatttgaaaagtatatagtaaaactgacatttttgtttatctacataaaaagatcaaaatctaaaggaatcgaaaaaaggaaatttacgaaagaagaggaactcaaataatttgatcggaatcttgatcttgatcttgatcttcttcaccacaatcataaacagatctaaccaaaaccaactgatcttccaagtatctctgaagcaaaccagcttcttccggttcatcaaacccgccgcaaccacatccttcttcacatctccggagcctcaaatcatcttcctcggcggtggatttagcaaaccaaggatgacgactacggagcggacgcgtgg

SEQ ID NO: 66 - DNA, 387 bp, Arabidopsis thaliana
gcggccgctcaggtctggtgctgtgatgggtttccttcttgcagcgagtggtctattggtgctttacattactatcaatgtgttcaagatctattacggagatgactgggaaggtctttttgaggctattactggttatggtcttggtgggtcttccatggctctctttggccgtgttggtggtgggatctacactaaggctgctgatgtcggcgctgaccttgtcggtaaaattgagaggaatattccagaggatgatccaagaaacccagctgtcattgctgataatgtcggtgacaatgttggtgacattgctggtatgggatctgatctctttggatcatatgctgaagcatcatgcgctgctcttgttgttgcctcgatctc

SEQ ID NO: 67 - DNA, 387 bp, Arabidopsis thaliana
tcgagcggccgcccgggcaggtgtttcctaacaaaggctctactttttctttagttaactactatggctcatttcctcgagacacaggaacccctcgtattctccgggaagaaacgaaacgatcgcgatgacgacgacggtgacgccttggtttcaaagaaatcagcactggcggtgtgtgatgccgaccctgcagcggccatagcgaatatccgacatgagtttggggagcacgggggagtaaacatgtccatcgaagcctccgccaccttcaccgtcatggaaccggataccatgaggcggatgttcaccggagaactgggaccggacaacgacttctacgtatacagccgacacttcaaccccaccgtgctcaacctcagccgt

SEQ ID NO: 68 - DNA, 387 bp, Arabidopsis thaliana
ttttggagtagctttatagagccaaaaaaaaaaacaattgagaataatatccgataaggtagatgataaaactcatcttcctttgttttacctaagctcttgcttctctttctaatcaatcaatcgttggcaactccgtctgattttgattctgctctgacatacgtgagactacgagcattgttgggagctacattgttgttgtttcctgtgtcagctgaatcacgcttccattgcatactcctgcctccacctctaacaacagaacgacccctaactgcaccacctctaaagtatgatggggctcttgtgaaccttccacctcgagaccatgacatgctcgatgcagcctcttgattttgtccattgcttcctttcacaatcttg

SEQ ID NO: 69 - DNA, 387 bp, Arabidopsis thaliana
ctgttccagtggttaaggaggaaactcctgccccggttaaggaggttgaggtgccggttactacggagaaagctgtggctgcgcctgctccggaagctacggaggagaaagttgtgtctgaggtggcggtgcctgaaacagaggtgacggcggtgaaagaggaggaggttgcgacgggaaaggagatcttgcaatcggagtcgtttaaggaggaaggctatttggcttctgaattacaggaagctgagaagaatgctttggctgagttaaaggagttggttagggaggctttgaacaagcgtgaattcaccgcgccaccgccaccaccagctccggtaaaggaagagaaagttgaggagaagaaaacagaggaaacagaggaaaaga

SEQ ID NO: 70 - DNA, 386 bp, Arabidopsis thaliana
tttttttttttttttttttttttagggaagaaacatcatttgtttaataagagtgataaaacatttgtgaacagacattgttatcgttatgaaaattattaagcaatttattcagaggcttgaccactgattcggaaacaactctagccaaaaaagcaacaagcacacaatatgtaaaaactggaagttactccttcaactgcggatcgctgggtgtagcagctgggatctctgttttagactctgcaattagaccttcaagcgttttatagaactgctcaggaagaggaccaggtcggtgctgaggaacatgctttggaatcggcgcatcattctcaatcacttcacactcgtaatcatctggtacaccccaaggatcccactcg

SEQ ID NO: 71 - DNA, 386 bp, Arabidopsis thaliana
  misc_feature (1)...(386): n = A,T,C or G
cttttttttttttttttattttcgaacacaaatttctatttatttatttttgggttggataaaattcagcgtttattggaataaataactaaggatacagtgcagatgaataaatgggtatggtagatgaataactttgttcaaactcattctaatattgcatgtagtagaggactgttaatgcacgaattaaacaagtacgggtgagtctctggggaaggtgaagaatcaatctctaatccacgagctgaacttgaagccggacaatcgacgggctgaanngcttgttgcgaactgagagcatagttgagggcgctacgaggcgatgctgtttcgagctggtggttctggtgagctggctcttctgggcgagctggatgatcttc

SEQ ID NO: 72 - DNA, 386 bp, Arabidopsis thaliana
  misc_feature (1)...(386): n = A,T,C or G
acctcgagcggccgcccgggcaggtaagaaatcatcgtcttcttcttcatctattcaggatcgatccggcttgagatttattacaaattcgtccttctatttgctccaaaagttcgacaatttcgttggggcaaagatggacgctgattccaagagatttctagctacgcttcgatcccgatctgaaatgttaatgggctttgaagaaatagatggagatgatgatttccaggaggagtttgcttgcccgttctgtgcagaatcgtatgatatcatcgggttgtgctgtcacatagangatgaacatactttagagtcgaagaacgcggtatgccctgtttgttctcttaaagtgggagttgatatcgtagcacacataacgcttc

SEQ ID NO: 73 - DNA, 386 bp, Arabidopsis thaliana
cggccgcccgggcaggtacccgttggacatatcagcgggttcccaacgatgctaaacgtctttgcagcaaatcttggaacaggaccactaagattgttgtatgataaatcaagaaaggcaagttgagtcatattagatagtgacagaggaaacactccagagagagaattgttgttaagcctcagatattgcaggctttgtagatagcctactgaaaaaggaatttcaccgtggaagaaattatcagaaagatcaagagtctcaagcctcgtaagccgaccaatctcagcaggaatttttcctgttatgttgttgttctgcaacagcacaatccgaagatttgttaagttggtaatgcttggagatagtgtacctcggccgcgacc

SEQ ID NO: 74 - DNA, 386 bp, Arabidopsis thaliana
  misc_feature (1)...(386): n = A,T,C or G
gtttgaatgtggttcccactgttactatgctcggggttatgaaagctcgtcttgttggcgctacaagaggtcatgctctcctcaagaaaaagagtgatgctttaactgttcagtttagggcacttctcaagaaaatcgttacagctaaggagtctatgggagatatgatgaagacatcgtcttttgctcttaccgaagtaaagtatgttgctggtgacaatgtcaaacatgttgtcctcgagaacgttaaagaagctactttgaannttcgttctcggacagagaatatcgctggagtgaagctgcctaagtttgatcacttctctgaaggtgagaccaagaatgacttgaccggtttagctagaggtggtcaacaggtccgagct

SEQ ID NO: 75 - DNA, 386 bp, Arabidopsis thaliana
cttcttcatcttcctcgtctcagtacacatacgcagctaattcttactattccgctccgtatcagcctccacagccttacgcggcggcgccttcgcctgctgtaccggcgcctgtggcatccattcccggagctacggtctatcctcagcctgttggaccggttcctgccgtctacgcttaccctcagtaccaacaggcacatcaattgttccaaagagatgcacagacaattacaccagaagctcttgagaatgtaaaagctgctttggcaagtagtgaaaccgaacacaaagcagaaactaaaaagagagccattcctcgtaaagctgctggacagtcttgggaggatcctactctttcagaatggccagaaaatgactatcgt

SEQ ID NO: 76 - DNA, 386 bp, Arabidopsis thaliana
tgtatgggagaccctgatgctgacttggacaatccagttttaaaggaagaacaagatgctcaagttggcaagggtacaaggggtgatgttaccatattgcctaccttagttgtcaacaacagacagtaccgaggcaagttggagaagagtgcagtactcaaggctctatgctctggttttgaggagtcaactgaaccagctatatgcctcagcacagatatggagacaaacgagtgcttagataacaatggcggttgttggcaagataaatcagccaacataactgcttgcaaggatacgtttcgtggaaaagtatgcgtgtgtcctatagttgatggtgtgcgattcaaaggagatggttacagccactgtgagccaagcgggcc

SEQ ID NO: 77 - DNA, 386 bp, Arabidopsis thaliana
tgggtattaccgtgcctgctgaccatacccttggaattgagcctaactccatttatttcactcgtgatgatcgtatctgtcacaataaattgtcatgcctcgacatcggtgtcttcaatcttgcaacaaagaccgtcaaacgcttccacggtctctccaacttcaacttcaacgatgctcagtggtttcttccttcttgattctagccttctccatggtttctccctcggccttgctctgtttctttctgttgctttctggtgttgttctcacatttccagactattatcctctttttcttttgatgtataatctgtgacattgccagtgtttaaatattttggacttaggtttcaaatttcaaaaaaaaaaaaaaaaaaaaaaaa

SEQ ID NO: 78 - DNA, 386 bp, Arabidopsis thaliana
tttttttttttttttaatcaaaattacaaatatataaatctcagtgtcttacccaaataaattacaaattaatattcagaaaagaaaaacgtttgagaaaataataaataaatagtcgtgacacaagcaaaatcaagaagagcttgtatcaccaccaaatgaatgtaaaagaatttttgaagtgaccaaagaaaagcgttttgagtatctcatttgacgcagctccaacggttttcttcacttatgtagccctttcgcgaaccaaaggagctctgctcgaacctttgtctagagaaactttacgagatgcagtcatggctgatctctctgcgattcttttttgcctttccattacaaggttttctattctcttcccggacgcgtgg

SEQ ID NO: 79 - DNA, 386 bp, Arabidopsis thaliana
agcggccgcccgggcaggtgttaaaacagaaaaaatgtcaacttcagaaaacactccgtttaatggcgttgcctcatccaccattgttcgagctaccattgtccaagcctccaccgtctacaacgatactcccgccactctagaaaaggcgaacaagtttattgtggaggctgcaagcaagggatcggagctggttgtgttcccggaggcgtttatcggtggttatcctcgaggttttaggtttggtttaggggtcggagttcataacgaagaagggcgtgatgagttccgcaagtaccatgcttctgctattaaagttcctggccctgaagtagaaaagttggcggagttggccgggaagaacaatgtgtacctcggccgcgacc

SEQ ID NO: 80 - DNA, 386 bp, Arabidopsis thaliana
ccacgcgtccgagaagaatgaatcaaagagtagtattggtgtgaaggatgaattactaatagctaaaattgaactgagactggtttcaagagtgatgtacatgtcgaaacttactactgagaagttacattggtgtcaggagaaacttgaaaagatcagcttcaacggtcggaagattcatatggaaccatatttctcgttgttaccttgttgagccatctctgcgtatagattagatcatagatgttggaacaatatggcttcatcagatccaggaagatgtctttttgttgttgttcatatcttcctgagaacaatagtatatctaatgaatgatatgtggtagcttagcgtttttctttctcctctaaaaaaaaaaaaaaaag

SEQ ID NO: 81 - DNA, 386 bp, Arabidopsis thaliana
tttttttttttttttaatgtaacacagtttgatttctggagtataaactataaatacagttacaacacaaccataatgccaaagccacacgaatcaaagtttcttcacaagtggatctgtagatgacataatatccaacatgagacagaaagctctctttattgtatgcttagtttatagaaatctgatgcataagactgagaatcctctaggctgacgcgtctatgacaccaccttcattcaccttcacgaaattatcgatgtactctttccttgcagggaggtggtcgtgtgggcgattgtatggtgtccagaccggttcacccacgaaaagccgcattgccttgatatagttgtctgagtctacggtgaagcgatgatatatt

SEQ ID NO: 82 - DNA, 386 bp, Arabidopsis thaliana
cgccctttttttttttttttttttttgagtgaatgttgaatattttattaaagatcaggcttaacacgtatctgaacattaacgaataaaaacacagtataaaggacaaattgaaggctaaaccacagaaaaccgaaccaaaatccaaccaggttaagatatcgatttggcttgtcataggtggctcactcctttaaggtcttccttgttcccttttagatgtgaataggcttgtcataggtggccatggcagcttccttaagagcctcgctcatagtgggatgagcatggcagactcgagcaatgtcttcacttgatgcatcgtagttaatcgcaagaacagcctcatgaatcagctctccagcgtttggcgccataatgtgaac

SEQ ID NO: 83 - DNA, 386 bp, Arabidopsis thaliana
gcggccgccgacgattaggttctggtggcttcaggattcctgcggccacctatgtagtgttcttgatgactggcatgacagttttcatcatattctacgaccgtgtacttgtcccgtcgctcagaagagtgaccgggttagaaaccggtatatcactcttacaaagaatcggagctgggtttacatttgcgataatgagtttattagtttccgggtttatagaggaaaggagaagaaactttgcattgaccaaaccgacactcgggatggcgcctcggacaggagaaatctcatcaatgtcagcgttgtggctgattccgcagcttacacttgcaggcatagcagaagcttttgctgccattggacaaatggagttttactacaag

SEQ ID NO: 84 - DNA, 386 bp, Arabidopsis thaliana
cctctagagcggccgccctttttttttttttttttttttttttttttaaaaagtgggattcaaagagagaatctccacagttccatctaacttcttatgaacatcaacaacaagtcaacaactacaatttcacaagcagaatgatactaattactttcaccattaggttaactactattacattaagaattatttttttctttactttgtttttgtaagttgaagccagatttgttcgaaaacatggatgataagatcatgatactcctttggattcaaagtaaggtagcaagcaagaaggtcttccaagtctttcgaagctctgatgttgttctcttctatcatctcaatcattgattccctgaaatctttctttggatcaacgg

SEQ ID NO: 85 - DNA, 386 bp, Arabidopsis thaliana
ttttttttttaaataaatgactgcttttatcactctgctcgtattacacaatactcttttgaataaaagttctaaatacctgaaatatgagcgacatacatatcccatttgcatggaccattacggatattacacatacaagctttatataggttatttacatgactgtgtacaactatgtatgtttgtttctgagaccttcgatacaacttgtttcataaagtttgtgtttcttcctcaacaggttttgtctggcaagtcttcaacttcttttcgtcgaggtagtgctgatagacaaatgaaaggaagccccagatagctaaaatgatggagaaaatctttgatgcatccatcttatcatggaaaactatcactgctacaactgg

SEQ ID NO: 86 - DNA, 386 bp, Arabidopsis thaliana
aaactaaacatggcgacggagaaaagcaagattctggtgatcggaggaactggttacatcgggaaattcctagtagaagcgagcgccaaagctggccactccacattcgctctcgttagagaagcaactctatccgatcctgtcaagggcaaaaccgtccagagtttcaaagatctcggcgtcacaatactacacggagatttgaatgatcacgagagcttagtgaaggctattaaacaggttgatgtggtgatatctaccgttgggagcatgcaaatcttggatcaaaccaagatcatttccgccatcaaagaagccggtaatgtcaagagattcttgccgtctgagtttggggtggatgtggataggacgagtgcggttgagcc

SEQ ID NO: 87 - DNA, 386 bp, Arabidopsis thaliana
ggtacacattaagattatgacaatcttcataaatcataatcgaaaacgaaggaacattaatggatcaccagattcttatgtacacttaatcaaaggtctgggatcactctctccctctgtacacccgtatttatgtttcgggataaaatcatatcaagtactcgttgtagactaagaaggccgcttctggataatccttaggaaggctattgatgtggaggtagaaccgaagaagatcctctttggtgaccgtctctggatccaccacatcttcatcgcaagttagcacccacagatcctctgagttcactctcttgatgctgccacgacaaaacgggcatgactccgactttgtgttccagttacggtaacatttgatgcacatg

SEQ ID NO: 88 - DNA, 385 bp, Arabidopsis thaliana
gaaatgataaattctaaatttctaaaacagagataaaacattacagagggagttggggaagaacaagaaggttcattcatgtatgtacactttgaacaatgcgacttaaggcttcattgttgtaagaaaaaaaggacaatcatatgctgaaacatttgcgtgtcaagcggcagataacgctcctagtacacccttatctaccgtagttaagcgacctcagattgtaatgatcaaggacacgaccaaaaattactcctgccatgtcccacaaattgcagctacaacacgaacctttttatttcaaggaaggagcatatggtgctgggcatggagagatggctgtatcgggcaactgatttaaaagatcaactgttgtcgtaaggca

SEQ ID NO: 89 - DNA, 385 bp, Arabidopsis thaliana
agtaaatgttatatcagaagaaaatatgattgcaatttgttcggaacacaacgtcagtaaacatgggaaatcagccggtcacaaatctagaattgttgcagattgcaaagatataagagaaaaaatgaatctgccaaaacggatattcgatgtttcaactcttctgagtttatttcatctggacgatcccagcgctaataagcttttgaatcttgttcataaccattggattttgcatgtgcttctgtgctgcgcttggattctcttgaagatcagacagtacctgtctcattacaggatctgtgaggatgttctggatttctgggtcttgcattccctttgcctgtctctctttcaattcctcaggagtaaggtctccgcgatt

SEQ ID NO: 90 - DNA, 385 bp, Arabidopsis thaliana
ccacgcgtccgaagggtgaagaaatcattgttgtgatcccttgggatgaatggtgggagctgactttgaaggataattcaaatcctcaagtagctttgcttcctctacatcctgatatccgggcaaagttcaacaatactgctgcgtgggaatatgcacggagtatgttgggcaaaccgtatggatatcacaacatgatattcagctggatcgacactctaggcgataactacccccctccccttgatgctcacttggttatttctgtcatgtctatgtggactcgtgtacaacctgcatatgctgctaatatgtggaacgaggcacttaataaacgactcggtactgaggatctggatttgtatgggatacttgaagaaacagc

SEQ ID NO: 91 - DNA, 385 bp, Arabidopsis thaliana
  misc_feature (1)...(385): n = A,T,C or G
cccgactggctgcgaagatactgaatgtggtggatgtatcatatggaggagaaaatggttttaatcaagctattgagctgtcagctgaaatccttgcgaatgtgaagtttatccaagagaagcgtctgattgggaagtactttgaggagataagccaggacacggggaagtatgtgtttggtgtggaagatacgttgaacgctttggagtctggtgctattgagacactgattgtatgggaaaatctcgatatcaacagatatgtgatgaagaacagtgcgactggtgaaactgtgatcaaacacctgaacaaggaacaagaagccaacactgnnaacttcaaagtagccgacagtgacttggctttggacgtggaggagaagct

SEQ ID NO: 92 - DNA, 385 bp, Arabidopsis thaliana
ccacgcgtccgggctgagcttgatatcaagaaagctctcgaaatcgatccagacaacaaggaggtgaagatagaatataagaagttgaaggagaaggtgaaagagtataacaagaaagatgctaagttttacagcaacatgttgtcgaaaatgcttgagccacacaaaggaactcagaaggaagcacaagcgatgagtattgacaccaaggcatgagtctttgaatcactttagagagtcgcattgattccaaaaactaaatgtgaaaagtctacaaatttctgtttttactctttgtaatcaatcttggtgtgtgttactgtttcagagttgttataaaacagacttgtaataaacgaggatctactccaagttaatgacccca

SEQ ID NO: 93 - DNA, 385 bp, Arabidopsis thaliana
  misc_feature (1)...(385): n = A,T,C or G
tgaaggagttgcaaagagaccctcctgtatcatgcagtgcaggtccaacaggagaagatatgttccactggcaagctactataatgggtccgaatgaaagtccttactccggaggtgttttccttgtcaatattcatttccctcctgattatccttttaaacctcccaaggttgtattcagaaccaaagtgtttcacgcaaacatcaacagtaatggaaacatatgtttggacattctcaaagaccaatggagccctgcccttaccatttctannntttgaaattctatatatgtatttagttatttgtcaatattttctataattccatatatcagatttggtatataaccaagaagctccaataggtaacacaaattactaac

SEQ ID NO: 94 - DNA, 385 bp, Arabidopsis thaliana
  misc_feature (1)...(385): n = A,T,C or G
tctctaggcttgaaaagtgatgaaggaggcttaaaactttctctttcggaatgtggatgccatgtggaagacattaccattgagttggaaggaggagcatcatggttttatcaggggatggttaatgcatttaaagaccaaattgggtcaagtgtggaaagtaccattgccaagaaactcacggaaggagtatcnnnccttgattcattcctacaaagccttccaaaggaaatcccagtggatgataatgctgaccttaatgtcactttcaccagtgatcctatattgagaaattcatctatcacttttgagattgatggcttgttcaccaaaggagaaacaaatcaagtcttaaaatccttcttcaaaaagtctgtatctttag

SEQ ID NO: 95 - DNA, 385 bp, Arabidopsis thaliana
cactgatcgtcggtattcagctatattttgatttctcagctccaaaaattcccaacgaaatggagaaaatggccaaaggatggtttccgatgagcggcactagtagcagcggagatcagcagcagcaaccgctgcaaacaggaggaacgtctctgctagctgattggaattcttacgcagcatcgagagattttgaagaagacaccggaactttaggcttcgatatcgaatccgccgttagatctgccaacgacactgtttccggcacctttaatgttgtttcgaaaggagttagagataacctgcagtctgcaacaagtagtatgccttcaggaaaagctttgatgtatttcggtttacttctagcaagtggtgtattcttcat

SEQ ID NO: 96 - DNA, 385 bp, Arabidopsis thaliana
aaaattcaatgatctgcttatatagatgggtataatttcaatgatctgctaaaagaagctcaatgatctgcttatatagatgaggataaattcaatgatctgcttatagatggggataaattcaattatctgcttaaaagaagctctatgatctgcttaaaagctcaatgatctgcttatagatggggataaattcagtgatctgcttatatagatggggataaattcaatgatctgcttaaaagaagctcaatggtctgcttatagatggggataaattcagtgatctgcttaaaagctcaatgatctgcttttatagatggggataaattcaatgatctgcttatatagatggggataaattcaatgatctgcttattgatgg

SEQ ID NO: 97 - DNA, 385 bp, Arabidopsis thaliana
cgcatcaggttggtgaataatgtttgagccggtaatgggattggggttacataatgatgatcccatagctcatttcatacagccaacaacatacataaagtgttattataatacaaaagaaatactttcattcatcaaaggacaaagaacaagaatctgacaataaactattgcttctgcgtcttagtccaaggttgtgtatcttagatcatatgttgaagatcttggactatttctgatatcggcggtctaaatcctggttccatctgcagtgaacgtgatatgatatctgcaaaacgtgacaatgatttcattggatacgctccgtgtaatgacggatcaaccattcttgtcaacgcatcgatgtcatgaagccgaggaatcg

SEQ ID NO: 98 - DNA, 385 bp, Arabidopsis thaliana
tttgagacatacacaaaaattcgtttccacattatatataaaggatacaaaaaaattccccgccgcttctcacatttctctatatatgctatttacatcaaagaattagctgccctgcttcacttcttattgggagtataaattttagatttgggttcgtaatttagccattaagctctgcaagctctcgagtttctgcttgagctcgttggcgtgttttgctgaagattctgaatcgttgagatcagacactagagctgaacacttggcctctaactccattgaggcttcttcgatggacgaaatggtagattcgaggtttgcacgtaaagaaatttctctcattgaatctaatgatgcagcaaaaggtgagctttttggactt

SEQ ID NO: 99 - DNA, 385 bp, Arabidopsis thaliana
cctctagagcggccgccctttttttttttttttttttttttttttttttttttttttttttttttttttttttgcgcatagaaaatcatctactttgaaaaatatgcatcattaactctttaaaaaaaccatttaacaaaaaaatcattgcattctaattcttcactctgtcttcaagtgcttgacaagctcatctaatgcattgcatgaggagcctccacctctaatagaggctttgagcttctcttttaaaacaagggttctctccctcatgcttgcaccttctttatccacaatcaacctcttcacagctctctcgacggctcctctttccagttcacctcctacctgaatccctattctccatacactctctagatatatt

SEQ ID NO: 100 - DNA, 385 bp, Arabidopsis thaliana
agatcagattaatctctctgtgaagtcgaagaacgaaaccctagttcccatggatctctcttcacgcttctcatcgatccttatccttctcttgatctccatctccatagcttcggctgagattcgtaaatcagagatccgatccgatgatcgaccaatcatccctttagacgaattcggtttcactcacagcggtcgtcttgagcttgacgcttccaagatctggctttccaacagcaatcccgatctcgatctctccaaagttggcttctttctctgcactagagacgcttgggttcatgtgatccaacagcttgaagaagaagagataacttgcgctctacaatcagatctcgttaagcatgtcttcaccttcaacaatctc

SEQ ID NO: 101 - DNA, 385 bp, Arabidopsis thaliana
  misc_feature (1)...(385): n = A,T,C or G
gcttatggcaggaggaggaacagaagcgtttcctgatcttggagagcattgccaagaccctgattgcaaattactcgattttctcccttttacttgcgacggctgcaaattggtgttttgtttggagcatagatcatacaagtcacataactgtccgaaatccgatcatgggagcagaacggnntccatctgtgaaacatgttcaatagcgattgaaacaactggttttgatgaaaaaggaatcaaatctttgcttgagaaacacgaaagatccggagattgtgatccaaacaagaaaaagaaaccaacgtgtcctgtaaaacgttgcaaagagattctgacttttgcgaataaccttacttgcaaatattgtggagtcaagttc

SEQ ID NO: 102 - DNA, 384 bp, Arabidopsis thaliana
  misc_feature (1)...(384): n = A,T,C or G
ctttttttttttttttaaacctgattgttttgttattgattatagaacccaaaatctctcagaagacattcctggttgtaattagaagaagaagaagaacagatagacgtgttagtcaagtaagtaatactagtcacaatttttagttgtccaggagattttcctatcaatccaccggttattaaaaactcatacaaagtgatacggttgagacaagtgtttccttctgagtatgttgtaatctaagnnncagaagggcctttgatgaattttggcggctttatctcttctgcaccatccactgcaaaatgtccttcctgatgacgctgttgaacccgcctctagcataaattggtttaatcagactggattcaccaacactgt

SEQ ID NO: 103 - DNA, 384 bp, Arabidopsis thaliana
aaccggaaatgtagtaacttgacataagtttttcaatccgacaataaaagtgatccgagttcgaatctatcaaaaaccaaacgacaaaaactaatcacgacgacatagcgttgttgactacaaacagttacaacatcctactttgatagagattgtggatccactcttatcactcgtcagctggtggcgaacgaggagaccggctcttctgcattgggctctctgcaccatcatacccaccatcactgtctcttcttcctattgacccagggctttcaacttggccattctcggggctagacctcgatctctctctcctttcaatgggactttcaacttcaccaaccccatttctcggactctccttcttgaacgggctgtgat

SEQ ID NO: 104 - DNA, 384 bp, Arabidopsis thaliana
tcatgataagcaagggttcgagcgcacaacagttttgtctagactcgaggcacgtctacttcatatgcagaaggattattggagatctaaatgtcacaaaattggatatgcgaaaaggcaaggcagaaagtctgctaaggatactgaaaaggacactgaagacagagaatcgtcaccagaatttgatcctaaaggatctgcctcatcgaggaaaaggaccgttccttcgagctttaaaactccaactgctgctccgaggtttaatactccaaccgcagcttcagaaaaattcaacccaagatcaaatgtgaatggcggaggaaaaggatctgtgaaagtttctaaagacatcgggtataaatcatcagagaaaggtggtaaact

SEQ ID NO: 105 - DNA, 384 bp, Arabidopsis thaliana
  misc_feature (1)...(384): n = A,T,C or G
ggcgcatgatttgatctatataccaattcttacaagggtataaataggaacaaccaaagaaataaaacgaannngaatatcaaagatttttgtgttcaaaggtaacaactgatgagcattttgtctaatttgggaaaaagagacacttttccatggatgtacgtacatacgttggccatgactattggttctgtgtagaaaatcatgagtgagaatctacaattctgggacctcctaggtacgcagagaggctcgttgtttatcatgttgaggcggtgaacaaccaggtgttcttctctattctatacgtggtgttttgggtcanngaaatcaacgttgacctctgattcagaacgtttccggtccgtcttttaccatgaattt

SEQ ID NO: 106 - DNA, 384 bp, Arabidopsis thaliana
  misc_feature (1)...(384): n = A,T,C or G
tgaagaatcagagagggatatgaatgggtctctcatacttactggaccgcctgatattaatctaccactctcttctgaagctaggccatctctgcttttnnngaacgaacactgtgacatcttagacgttggacttggacctcagctatatgagcctgaggctgttgttcatgtgcctaaggttgctaagaagtacaacaagcgtgttgatagtgcatggggtgcttggcttttcttcagtttctacttcaaacctgttttggatgagaagtctaaaagtaagttaacgagggacagcaatggcttgtctgggtatgataaatctgatttgcagctcgactcgttcttggttcagcatgacatggagaatatgtacatgtgggt

SEQ ID NO: 107 - DNA, 384 bp, Arabidopsis thaliana
gcggccgccaagatgtcaacctataatccgattctctcttttacacatgaggataactaaacacagatgaatatcagataaatatattgacccaaaaagttaaactaacaggactttgtgtacaagtgcaacacaaataagtaccttggtcagggtagtttgtctctgtacataatgctatttggtaggtggagatctcagcttatcatccgagtcatgtttaagagaagaatcccctcccattagttgttcgaatccttcaaccttaacgggttgagccctgacagttcctagtgtgggtgtttgcatctgtggaatttgcattgaagccaattgtctgaattggttatagcccggctgttgttgcatattcgacatggcagc

SEQ ID NO: 108 - DNA, 384 bp, Arabidopsis thaliana
  misc_feature (1)...(384): n = A,T,C or G
attacattttcttccgatcaatacagagagatcagtttctgagagagaagaagatgtctatagaggaagaaaacgttccaacgactgttgactcaggagctgccgatacaacggtgaaatctccggagaagaaaccggcggcgaaaggtggtaaatctaannagacgacgacggctaaagcaacgaagnngcctgtgaaagctgctgctccaacgaagaagaaaacaacttcctctcaccctacctatgaagagatgattaaagatgcgactgtaacgttgaaggagagaactggatctagtcaatacgcgattcagaaattcatagaggagaaacataaatcactgcctcctacttttaggaagcttttgcttgtgaatctca

SEQ ID NO: 109 - DNA, 384 bp, Arabidopsis thaliana
aagtccttactctagccgtcgctctcgatccttcgcagccagacgaatccaacatcaccgcaacaccgattctacaggatgtgctgaaggagatatcggtgaagcagaagtggaatctagaggaagttagattttcgaaattggaagttaagaagattcgtattggtacgagtcggagatttgagatccggatccgattagggaagagcagattcgtattcatcttcccggatgaagtaacagattggagaagaagcggcggaggaagagatgttgagttgcaggaactagttcgggaagttaattcgagtaaggttcttgatccaccgcttgtactgaaaggtccatttgagctacgtgtcgatggcgatgatcgtctctcgc

SEQ ID NO: 110 - DNA, 384 bp, Arabidopsis thaliana
ctaacgtgggtgggccatcaactaccgttcaggcagcgacgacctattcctttgatgttcaaaaggccgaatctgaaactggcacaaaagaagtcgaagtcaccaatgtaaactcagacggtgatcaaagcgacatcaacagcaaggctcaagaagtcgctgcagattctttgtccaatctagatgttgatggccaatcacgcatgaaagggaaagggaaagccagaaccagaagaacacgctctgtcaaagatgttgttgatgatgctaaagctttatatggagaatctataaacctatatgaacccaatgattcaacagaaaatgttgacgactctactaaagcaagcacaggtgaaactggtcgttctgataaagcaattt

SEQ ID NO: 111 - DNA, 384 bp, Arabidopsis thaliana
tcgagcggccgcccgggcaggtactgtttgtattcatgcatcctcgtcgacatataaccaaccaaacagaaaaaaaataaagaaaaagaactcaccaaaaacaaaagccaaatggctgaaaactggctgctccaaatattgatatcaagagagcttgcttatacagatgcaaaaaccgataagcgtcttacgaatgcaaagccatgaagaggttctgcttacgggcatgctctgggacaagcctgttcacgatttcaggaggtatgccagatagctcttgcggtttaaagttgaaaagtggaggaagtggtcggccattgggaagacgagtgtttgggtcccttagctcatcaaataacggatggatacaagcttccaaagctg

SEQ ID NO: 112 - DNA, 384 bp, Arabidopsis thaliana
tttttttatttgaaagaaaaaaaatgactcgacagtgataatgtttccaattgactagcacgaagcaagagacgaagaagaacaaaagcaaaagtttaaattaaagtcattctcgtcctcatccctgcaaacatttttattgcaacaaaccttgggatatataactcaagtctctggtgttaccagatttattgtttgatcaagttcctgataacgtattgcaaaatccctccgtgatcgaaataagccaactccacctctgtgtcaaatcggagtgtacatgtgaaagatttgccattgtttgtgacgactgttacatcttgtcctggtttgatctcactaacattgtttgggagctcaatggtgtaaagctcctgacccgtt

SEQ ID NO: 113 - DNA, 384 bp, Arabidopsis thaliana
ggtcgcggccgaggtacacacacgtttaaatatcgaaaacagtaatgatgttcagaatttattttaatgacaaaacttttaaaacgctctaactagcgtttaggtatcataacaaaactagaaacgcgtcctgcgttttctactggtgaacttggagtcagcaggaacattttttccttttcttctactttgctctttcttcctcagaacccattctcttcctttcactttcgtgttcgttctctgccttttccttggcctattcctatctgatacacccacctcttcactctcttcatcgtcgctgttgtcatcttctgagcaactctcatcatactcatttttactggtctgaatactcgtctgaacagtgccacatgtgag

SEQ ID NO: 114 - DNA, 384 bp, Arabidopsis thaliana
ctgtgatgtttgagattgtccgtaccatctgagtttctccttgacgattacctccactttctgaggctttagatctaagatcattagttttatttttacttcggcgatgatgatgaaacaagattaccatcaaactttgagaggtttttcgctcgttgatgtaaacttctttttataatctgagcctagtttgtttgtttgaaatcttatgtgttacatgttatatgaaatcgttttggtgataggaaaggcaacaaattagagtctctgattcacttatgtcaatagtggataaagcgctgtacgttgccgagatagatatggcgatattctggtacttggactagttttgatagttccatgtgcattcaaaagcccttacat

SEQ ID NO: 115 - DNA, 384 bp, Arabidopsis thaliana
tcgagcggccgcccgggcaggttgaggacgagctgcgtgatgctgttctgctcgtatttgctaacaagcaggatctcccaaatgctatgaatgcagctgagatcacggataagcttggtctccactctctccgtcagcgtcactggtacatccagagcacatgtgccacttcaggcgaggggctttacgaaggtcttgactggttgtccaacaacattgccggcaaggcgtagagggaaagttcgtggtggagttgatttgctgagcaaatctggatgcaggggcaaacattatctgaattttttttttggtttccgttttcgttattgttctgcttttttttttgggatatgtcgatggattttgtgattgtacctcggccgc

SEQ ID NO: 116 - DNA, 384 bp, Arabidopsis thaliana
ttttttttttttttttggaaaaacatatttgtattactcaattttagattttatacatgccagcgaaaggagtattcaccgatccaacccaaagagttccatctttttcttcaacctcacttatagatatccacttattttcatttttaccttcgaatacctctaatataacgccactatcctcgctcaacctcacggccatgccgttcccattgtacctggcccaaaccgaatggaccttcatccaatccaccggcaggcccaaagcggcacgtccaagccacgcgttcgacatggcgaactttgtcagctttgagtgttttgtgttcaagcctacccagaatccgccacgtggacttctctttatgttgtctggaaacccag

SEQ ID NO: 117 - DNA, 384 bp, Arabidopsis thaliana
agcatgccccaaattgcacgtgcctaggtgcacgccggcgggcccgacctatgcataatccgttgtgttgtaagaaaagggaaagggcttttggtgtcttgaggatgcttatgtggaacaagtttcaagagacgaagaggctgattcaatttgaggacaatttgattgagggatgaggaaaacgttcgtggtttgaacggtggtactgtgcttcttcgattgtgtcaaaaccctttcaacacacatctgaggagacgtcgtcgacgcagccacccacattagacaaccataatcttatgtcatctcttcctcaacaacaaccaaaaactactttcctcccacacacaatccaaacgtatccagtttccacgtcttcgtctgctt

SEQ ID NO: 118 - DNA, 384 bp, Arabidopsis thaliana
tacttactaatgcgatttgtatacattactccaaaggaaagacaagacacaacagaaataatacttatccttcacttacataatggaaatcacagaaactttgacaacgaaatatagcactcaaaaggttgcgagttgatgattagtcacttgccaagtccaagttctttctcgacctctcttgttaggctgaactgtaaagtgttctgccatgggaacagagttcgtgtcaccggaagtttcctcctcaaatccttgaaagtgttatccggtaattttgaataagctacctctagagatgcaaggtactctgtttcatggtgcctgataatattggctatggcaatcgcgcagtcatctgcagactgaaatattgttgaatct

SEQ ID NO: 119 - DNA, 384 bp, Arabidopsis thaliana
  misc_feature (1)...(384): n = A,T,C or G
cctctagagcggccgccctttttttttttttttttttttttttactaaaaatgatttctttatttccaacaacactgcatctgcattgcatacaatgcattcatcttctttggatgtgatgtaatatttgttgtttttttattctttggatgtgatgtacaattgtacttaactaattgatcggacatttttttatcaacaactcaagcttttccggcagagccaaagagacggancttatctgcgatcacagctttcatggctgcttttgttgcggacatgacatcaacaatgtcggtcttcttnccagagctaagagcttncatgtaagccgttcttacttctgtgttcacgttgaacttcctcactccattctcaatgcat

SEQ ID NO: 120 - DNA, 384 bp, Arabidopsis thaliana
atcatgcagtatcaaacttcgctcatcgcaaccgcattcaggcattgctaagggggagattcttgcgaaatggtgacaacgatgataaagagaaaccaacatcatctgcagccactgagttgggctttctaagagagaggcacactgtatctgagctgagggaggaatttatatccagactggaccggtctgcctctggtcaagcgagcagtagtcactctgagacctcatcaaatgctgaaactgatcataatagaggtgaacaaaacgacctgaattgtctagatagcatcaatgatgcagacggtggttcagatcaaaatggccgagaggctgacaaccaaagttcactggatgagataactaactctggacggtgttgta

SEQ ID NO: 121 - DNA, 384 bp, Arabidopsis thaliana
cctctagagcggccgcccttttttttttttttttttttttttttcccggaaatttacttttattgggctaggcccaaaactgtatatctttgaatcatcgaaaaataattttaagatttttttttatctttacaaccagagattaagattaccaacctaattacatatattcccccacccaattatctaatcacccaatcaaaaaatccagaaccctttttgatctttaagcttggcatcttaagaaaaacgccaacagctttaagaaacaagagcttgttgtggtttccttgtcctgtccaggcatcacgacattgtaacatttcctgtactgttcgcttcttcaactcttttagaagaagaaggagcttcttgtttcataaa

SEQ ID NO: 122 - DNA, 384 bp, Arabidopsis thaliana
ccaaggcggagttacggggatgcgtcaacgacgttcgtcgtatgtacaaatgtctcgttgaacggtacggcttctccgaggagaacatcaccgttctcatcgacaccgatgaatcctctactcagcctactggcaagaacatccgccgcgcgcttgctgatctcgtcgaatctgccgattctggcgacgttcttgtcgttcattacagtggacacggtacgaggttgccggctgagactggtgaagacgatgacactggtttcgacgagtgtattgttccttgcgacatgaatctgattactgatgatgattttagagatcttgtggacaaagttcctccaggttgcagaatgacaatcatttcagactcttgtcacagtggtg

SEQ ID NO: 123 - DNA, 384 bp, Arabidopsis thaliana
accattatatttggtgctgatgttacccaccctcaccctggagaggattcaagcccatctattgctgctgttgtggcatctcaggattggcctgaaatcactaaatatgctggattagtttgcgctcaagcgcataggcaggagctcattcaggatctgttcaaagagtggaaggatcctcagaaaggtgtggtgactggtggcatgataaaggagttgctcatagccttccgtagatcaactgggcataaaccactaaggatcatcttctacagggatggagtcagtgagggacaattttaccaagttttgctctatgaacttgatgccatccgcaaggcctgtgcttcgctggaagcaggttatcaaccaccagtgacattt

SEQ ID NO: 124 - DNA, 384 bp, Arabidopsis thaliana
caacgaatgctgttgctgcaagcacttcggttcatactggtgttgttagaggccttcggtggcttggaaattcaagattagtttcattttcttacagtcaggtgaatgacaaaagcagaggctacataaataggcttgttgttacctgccttagaagtgggttgaataaaccatttcgtgatttacaaaagccagagcgcactcccataagagctcttagaacttcttcttccggaaggtatcttctaattcttttccgtgatgctcctgtagaagtttgggcaatgaccaagcatccagtcatgcttagatcattagctcttcctttcacggtagtggaatggacgcttccagctgttccgcgcccaggtcaaggcggtccgt

SEQ ID NO: 125 - DNA, 384 bp, Arabidopsis thaliana
  misc_feature (1)...(384): n = A,T,C or G
cgctggaaaatcaagattttgaagaatatgacgaaccaccagttttcgggaagaggaccctttttgtctcacgtcaaacaggggaacaagagcaatgggtgcagtgtgatgcttgtgggaaatggcgacagctgccggtggatattcttcttccaccaaagtggtcgtgctctgataatctcttggatcctggcaggtcttcatgttccgcacctgatgaactctctccaagagaacaggatacacttgtccggcagagcaaagagttcaaaaggaggagactggcatcatcaaacgaaaagctaaaccagtcgcangatgcatctgctctgaatagtttaggaaatgcaggcatcaccacaaccggtgaacagggggaaatca

SEQ ID NO: 126 - DNA, 383 bp, Arabidopsis thaliana
cttttttttttttttttttggattgcaaattgccaattttctataacacttatttggctaaatataggatttattatatctgttttagacatgacacaagaatacaacacaaaacattcatcacctcacagttatcatcacttcaacaaaatctgggccatccctttagcatcttttcaaaaccacagattctctcctcggttcagtccccggcctaatctgagaacgaattacagaagcaaaactggaatggggagggaaagaatgaagcaatttgattttgaatcatgcctaagatttgagaccaaaacagttgaagtatcttcaagaattgattgatgagaacatctatcttcctttctttctggtatggtatacaacaa

SEQ ID NO: 127 - DNA, 383 bp, Arabidopsis thaliana
ttttgcttgaaagagaagattcttataccaaaacacaaaaaaaagacatgtgttttgtcttgatatacaatatttaccacaattatatacatcacaagttttaagagaaagggccttgtatctatgcatccagatccttgggaataatgatgtataggttctatggactatgcagatgctgctgaagaatatgtcttgaagaggtaagccagaatcttctcgtaatcacctaattggacaccggtgtttggatcaaccaagaatggaaccttattggatcctgaagcatttagaagtgatttcatccgtgtggacccttctccaatgttgtgtaatacatagggaagctccagctcacacagtgcttcacgcaccaaccgtga

SEQ ID NO: 128 - DNA, 383 bp, Arabidopsis thaliana
cgtgctccacgaccacgtcctctaccacgagcactctgtttcttgccattggcctcttctccatcttcactgtagtcactgtctgcgtcactaccttgaacttccttctccttgtcgctgttatcttcatcactgtcttgttcagaatcagaggaagcttttgatgctttcctctttttagaagcacctcttttggtaactgcttgttgctttggtgccaaagtttcttccttgacttcttctacactctcttctaatgatcctttcccgtcatagacctcgagctgctcaagcctatcagcgatatctgttctgtcaacaatgaccattgaatggcaaaaaccgcatgccacacccattacatgcattccctcgagcatatc

SEQ ID NO: 129 - DNA, 383 bp, Arabidopsis thaliana
tcgagcggccgcccgggcaggtcttcttcactctcgtcgtctcttcttcaattgcagctagagagccatggcctcctccttcaacgaagaaaccgccaagaagttgcttacccaggttgagttctacttcagtgacagtaatctacccacagacggatttctcaacagggaagtcaccaagagcaaagatggcctggttagtttgcctctggtttgttccttctctcgtatgaggaacctccttggcctcggtaacatcaatagagaagacatccctccgaggattgtggaggaagttgctaatctcttgcgcacctctgattttcttaaagtttccaataatggacaaaggatcggtagaggaactaaactctccaaaccgg

SEQ ID NO: 130 - DNA, 383 bp, Arabidopsis thaliana
tcgagcggccgcccgggcaggtacaacaacgagaagaagaaaggaggaagctttaagagaggaggtaaaaagggttcgaatgaaagggatccattttttgaggaagagccgaagaaacggagaaaagtcagttacgatgacgacgatatcgagtctgtggactctgatgcggaagagaacggatttactggcggagatgaagatgggagaagagttgatggggaagtggaggatgaagatgagtttgctgatgagacggcgggagagaagcggaagagattggcggaggagatgctgaatagaaggagggaagcgatgaggagagagcgtgaggaagcggataatgatgatgatgatgatgaagatgacgatgagactattaa

SEQ ID NO: 131 - DNA, 383 bp, Arabidopsis thaliana
agcggccgcccgggcaggtgtcaaggttattgactttctcattcagcagtgaagcttgaatcatggcctcgagaattgctaaagatgtgactgaattgattgggaacactccattggtgtatttgaacaatgttgctgaaggatgtgttggtcgtgttgctgctaagcttgagatgatggaaccgtgctctagcgtcaaagacaggattggttttagcatgatttctgatgcagaaaagaagggtcttatcaaaccaggagagagtgtgctgattgagccaacaagtggaaacactggagttgggttagcattcacggcagctgccaaaggctacaagcttattattacaatgccagcttctatgagtacctcggccgcgacc

SEQ ID NO: 132 - DNA, 383 bp, Arabidopsis thaliana
gaggctcaagcttaatcaattcaacgtctccgataacaaactctatggtaagattccttctggatttcagcaagatatttttcgacccagtttcttaggtaacccgaatctctgtgccccaaatttggatccgattagaccttgccgatccaaacgggaaacccggtacattctcccaatctcaatcctctgcatcgttgcactaaccggagctttggtttggctattcatcaaaaccaaaccgttattcaagagaaaaccgaaacggaccaacaaaataaccatcttccagcgggtcgggttcacggaggatgacatatacccgcaattaacagaagataacataattgggtcgggcgggtcgggtttggtttatagagtga

SEQ ID NO: 133 - DNA, 383 bp, Arabidopsis thaliana
gcggccgcttttgaggtttgagagagatcggagaagatggatctcgtgatcggtgggaaatttaagcttgggaagaaaattggtagtggatcatttggagagctttatctaggtgtaaatgtccaaacaggagaagaagttgctgtcaagctggaaaatgtgaagaccaaacatccacaacttcattatgagtcaaagttgtatatgctgcttcaaggaggatctggtattccgaacatcaagtggtttggagttgaaggtgactacagcgtaatggttattgaccttctaggtcctagtcttgaagacttgtttaactactgcaacagaaagttaacattgaaaactgttctcatgcttgccgaccaattacttaacagggt

SEQ ID NO: 134 - DNA, 383 bp, Arabidopsis thaliana
cacgaagaagccaaaaccaagctcagacgaatccgtggtgtcgatgacgtcagccaagagtttgacgatttgttcgccgctagtaaagagtcgcagtcgatagagcacccgtggagaaacctcctccgccgcaaataccgaccacatctcactatggccgttatgattccgttctttcaacagctaaccggaatcaatgtgattatgttttacgctccggttttgttcaacaccattggtttcacgaccgatgcttctctcatgtccgctgtggtcactggctcggttaacgtggccgctacgcttgtttctatctacggtgttgacagatggggacgtcggtttctctttcttgaaggtggtacctgcccgggcggccgctc

SEQ ID NO: 135 - DNA, 383 bp, Arabidopsis thaliana
  misc_feature (1)...(383): n = A,T,C or G
cctctagagcggccgcccttttttttttttttttttttaacgtcgaacccatttttctaactttctcctttacataatggaaagttcaacataatatcacacaagtaatgaacaaaagccacttatgatgataacgaccatagaaaaacagagttttcaaaatatatgcgcggctaagccattttcatcttctttatctgttgttgttaagaacatgtcgaagccggaatgtttcaccttggtctccattcagtgaccgcctttctaaacagcacacggttaactgtcttagcagnnnctctagatgggattgcnngtgacagcttctctgcacatctttcttatttggatttgttgatagtattgctgcattcaccgcatca

SEQ ID NO: 136 - DNA, 383 bp, Arabidopsis thaliana
gcggccgccagataacaagtgtctttaagagagattaggaaccaaaccactgagtaacgagtctttacatgaaccgccaagtactagttgcctcatctcctcccctcgagcttgagaaacaccattttaaccatcttgtacctctcattgggtggagacacgtttcatgcacagttacaagtttactgacagtagattgcttgatcgatattagaaggaattggtttgatttcggtcccaagttcttgctcagtctgatacattttgaaacggtcctcataagttaccaaattcacagccaatccaaggtgtccaaaccgtcctgatcgacccaccctgtgtagatatgactcagaagtcctaggaaaatcaaagttgatcac

SEQ ID NO: 137 - DNA, 383 bp, Arabidopsis thaliana
  misc_feature (1)...(383): n = A,T,C or G
tttttttttccaacataaataatatacacacaaaaaaatgtgttacataccaaaaacatacacaaaagtactaaaacctttaaacataaatcaaagcctcgatacatttttttgaactgttccaaattttgatcaaagatggaaatgactaggatgtgattttgtcatcctagcttcaccagccggttcatcgttatcgatcctcttgacattcctataagctgcataagcgataacgtaaannntaactagaatgataagtaccacaatgttgatcaccgatacttttctccaactcttcttcaaactcccaagaacaccagctttacaagaactacactgataacagagcatgctctggtcgttgctccacaccatacagt

SEQ ID NO: 138 - DNA, 383 bp, Arabidopsis thaliana
  misc_feature (1)...(383): n = A,T,C or G
cgtaagcttggatcctctagagcggccgccctttttttttttttttttatgncaagctgatatctattataattataaccacactttgaaggggttctagattcaaaagttgagactacaacttgaagttttctataatgtaaagaggagaaagaagagtgtacataaaagaggacttaggcgtagtaattcaagcttgctttcttcttggcttgtacttgaattataccttcattgaaatcctcatggttcacctcagttgcatcccggcgcagggcaagcatacccgcttcaacacacactgctttgagttgagctccattgaaatcatccgttgaccgagcaagctcttcaaaattgacgtctgcattcacattcatttt

SEQ ID NO: 139 - DNA, 383 bp, Arabidopsis thaliana
tttttttttttgtgccgaaattacagcagatagattaagttgtgaattgttacaagctttgtttgtacatgttgaaatgaaaattgagttctgagttctgacaagtgttacacctgaagaacctcaaagaatgactactagttcttcctggaacaggcttgtaattaaacttcattagcttctgcttcagcactcatctgcttttgctgtgtgctgttctcatctgatcacttgcccatggtagaccaacgaaacactgtaagcaatcacaagggggagcagtgaacataatataaagtgacaagtcatgaatgccctacatcactagcctctaaaatctctcaaatatgatcaaaccaatggcgcattttgctcttctgaat

SEQ ID NO: 140 - DNA, 383 bp, Arabidopsis thaliana
  misc_feature (1)...(383): n = A,T,C or G
tgtataaaaaaggagaaaaagagagaggtacttcggttttccagaatttgcttcaatgtggttattatgaggatgaattagcttggaagatcatcattgatggtgtggggaagcagggacttgtagaggcattttatgaactattcaacgttatggagaaaaatggctgnnnntttagctctcagacatattcactgctaatcgaaggacctcctgatagcacataaaggggtttctatattatatcaatttgccagaggctcatgcaattctttggaactcagattcttttgatccatgactcgacctgaaaaatctgcaagttgccttgtttcttgtgatattgctacaggtcatacaataaaggttcaaactttggcata

SEQ ID NO: 141 - DNA, 382 bp, Arabidopsis thaliana
agtcatgaaaccattttctgtcttctttttttcttgttttattactttcatttccatatgaaactcctatgctcttacagagaaggagacacatattgtctagacaagctaaagatatcttttccttcaaatggtgaagtccaatctggagaggtagctgcttgttgtgtttccacgataacaccagcacctgaattctccatagatacaccgttgctgttgttgagtctacctcccatggaaccatttagactgtaccggttcatgttctcatcatatattaggctgctgctctttaacccggaccagtttccattgactctactattttgtgataaactttgatctagactccagtctatgtttgtgtagtccactgaac

SEQ ID NO: 142 - DNA, 382 bp, Arabidopsis thaliana
agcggccgccctttttttttttttttactgggaacaattgttcttcttattagttaagtaggcaacacacagatatgaaagtataactacacatgtaaatcaatctgagggattacgtgttaagtgttctaagggtcacaaaagaaactgcggttttcttacgtcgatgaaattgtaattcaacgtgatgatccatcccaagggagcttcaaaccactaagtttttgattggcaagatgaatgagcaacgagttcttcagaatagcgtatatgatctctgtgcgtataagaagtcttgactatagtttcccacttggtaacacttgtggagttttcttcaacattctttttttggggatgaaacaggtatctcggtgaaggg

SEQ ID NO: 143 - DNA, 382 bp, Arabidopsis thaliana
tcgagcggccgcccgggcaggtacattttcaatgttcaaacaaatgaaaaagctaacttattgtttgccttctgtaaaaacatattgtggcatatgataaatgatcacgaaaatacatttttgagacagagacaagatatttggtgaacagagggaaattgcttatgccacattacagctcagaatcagggattttctcctccttaggcggagcgaactgcctggtgagccgagatctttcccatgggtccaatggcactcgttgcggtggttgaggtgttgctggttttgattgcctaagctcgttctctctgtcaataaactcgatataggccataggagcagcatcaccaactcgtatgcgagtacctcggccgcgacc

SEQ ID NO: 144 - DNA, 382 bp, Arabidopsis thaliana
attctctctaccgtgatcaagatgcagatctttgttaagactctcaccggaaagacaatcaccctcgaggtggaaagctccgacaccatcgacaacgttaaggccaagatccaggataaggagggcattcctccggatcagcagaggcttattttcgccggcaagcagctagaggatggccgtacgttggctgattacaatatccagaaggaatccaccctccacttggtcctcaggctccgtggtggtatgcagattttcgttaaaaccctaacgggaaagacgattactcttgaggtggagagttctgacaccatcgacaacgtcaaggccaagatccaagacaaagagggtattcctccggaccagcagaggctgatct

SEQ ID NO: 145 - DNA, 382 bp, Arabidopsis thaliana
  misc_feature (1)...(382): n = A,T,C or G
gcgtccgctcggtggagactattgatggaggaaacactattgtgaaaggtaaacatatcattgttgctactggctcggatgttaagtccttgcctggtattacgattgatgaaaagaagattgtttcgtcgactggagcgttgtctctatcggaagttccgaagaaattgattgttattggtgcggggtatattgggcttgagatgggttctgtttggggtaggcttggatctgaggttacggttgttgagtttgctggagatattgttccttnnntggatggtgaaattcgtaagcagtttcaacgttctcttgagaagcagaagatgaagttcatgctcaagactaaagttgtttctgtggattcctcctctgatggtgt

SEQ ID NO: 146 - DNA, 382 bp, Arabidopsis thaliana
  misc_feature (1)...(382): n = A,T,C or G
agagttttttgcagaatatctgaagaaagagaactcgaaaaaaaaacaggcgctttatgtcatgaaccctaacaagttcagagcctgtgaatttttgatacgtttccatgaacaacaacgtggggataaaatcatcgtctttgcagacaatctttttgcacttacagagtatgcaatgaaactccggaaaccgatgatttatggtgcaaccagccatatcgaacgaacaaaaattcncgaggcatttaaaaccagtaaaaccgtgaacactgtattcctgtcaaaggttggtgataactccatagatatccctgaagcgaatgtgatcatccagatttcgtcacatgctggttctagacgtcaagaggctcaacgtttgggt

SEQ ID NO: 147 - DNA, 382 bp, Arabidopsis thaliana
ccacgcgtccgggaaaaaacgagaaactgtgatcttggcccttttattacccctatcctcttcttcttcaatctctccgatcaaaatccttttaagctctgtagacccaggttacgcagagaagaagaacagaacaaggaattatataatcattggcttgatcaatctgaattgcagttcatggcgctaaaccctcaattgctacccaatgggatgcctgttccctttgttaatgaaatgttcgtcctagtccgagatggtgttgagtttgaagtcgacaagatccctggagggcatggaggtcatgttaaggccaagggggtgatttacttgtctaatatacggatggtctttgtttcaagcaagcctgttgacaactttg

SEQ ID NO: 148 - DNA, 382 bp, Arabidopsis thaliana
agaatcttgtagctccacaaattaatatatatctcatttcaaagtacttcccaaaacatgtaaaaacaatcaaagattctttccatcattcactacacagaaggtaaccaaattctcacaccataatgtacagggtaaacctccaaaagaacataatctctcagtggcccttgcttcgtggatcttcagagtgcatagcgttgtagtcttttgtgtaaacccggtgcctcctctctctcgcatatataacccaaaacaccaaagatgacattacagaagcagacaccaccacaagacccacatagatccattgtgtgtatctcttaagtcccggacaatgatccctctctatatcagtgaatgtagacctcacgaagtcaca

SEQ ID NO: 149 - DNA, 382 bp, Arabidopsis thaliana
tacaagggaacggcataactattgctttttattcttctttgtagttgaccaataaaaaagtttacaccggttcaaatgaaacaaatacaagtcctaaattcaaccaaattctgagttcatcaacatcagttgctttaacaaaagcaaagatttcaaaacttcagaatcagcaggaagtaggaaatatttgtcgacccatgaatgcaactggttcacggctgaacactgaaactatgaagatcccttatttcctttgagattgatgaccgagagttcttgttcaacatactctcctgcgggtatcgccggatatttacttgccaaagatgattctgcgaaatgtcccaaaggtttcagctccgcatcagaggcaatgtgggca

SEQ ID NO: 150 - DNA, 382 bp, Arabidopsis thaliana
  misc_feature (1)...(382): n = A,T,C or G
ttttttttttattttcaaatcaatgtaaaatagaaacgttgaagagaaaaacaactgaagaatgggggcaaagcgccagnaacttgtaaaaacaagtaaaaggattggcaaaagtaagaaagcacaccactttaaaactaacattaagctttggatgatgatgattcttcttcgtcatcttcatcaatgtcccaacttaaatcttcatcttcctctgcagcactcagacgtttacgcagctcagctctgtttggactaccaccagaccgactcgtttccttaccatctatgctactcatatcctcgatctcgtcccatcccaaatcctcttcagatggttgttgagttgatgaagaagcagccacatctggtttagctgagt

SEQ ID NO: 151 - DNA, 382 bp, Arabidopsis thaliana
  misc_feature (1)...(382): n = A,T,C or G
ttttttttttttttttttttttttttcgacacacaaaagtccagctctggtatataattttcataaacatatagaaacatgagaagcagcagaaaccaaccacacaactaaagaaaaacattagaggaatagtatgttttaaccagacacagagccgtgtgcggtttgaaaatcggagacactggtcagcagatgatgcgtagccttctcataattcacaaaacccatgaaccagaagtcatgaccatccaccgtcgtcaactgaatatacttctcaggtggagtctctttcaccaccaccggattcaccgtcgctacatnnnncaaaggtacaaccaccctgtagtagctccaagattcttgaccagaaggtgctgtgaag

SEQ ID NO: 152 - DNA, 382 bp, Arabidopsis thaliana
  misc_feature (1)...(382): n = A,T,C or G
gaaacaaatgtttaatactaatacgatgtggtgatatatcacaaatttatgtcacaaatttaccaaaaactatttcaaaagcttttgatgggtgatcaagagagtgcaacattatttataggatatgnnagtaacttaggcaatctgcaaaacccaatctttagtgtcttggatagaacctgtttgtattccgacaagaatagatcgaagttgctgtgtaacaatcccatctccaactttgtactcagtccttgtgttcttaaaagtgatgcttccaacagaagcaactccagcggcagttccagtgcaganaacttcttcagcttccttcagttcttctaccggaacacttcgttcttccactttgtaaccaagatcaagg

SEQ ID NO: 153 - DNA, 382 bp, Arabidopsis thaliana
ttttttttttttacagacaaacaaagtccatttatttctgaccaacaaacaaaacattgtcacagcttgtacaaaccgatcttatttccagcaacaactaaaaccaaacggtaataaaacatttgttaattttaatctcactcgcgagcaacttcgacaagttgtttcccgacgttcttaccgtggaagagtccgatcaaagcagaaggtccattctcaagtccttgggctatatcctcaacatatgttatcttcccttctcttacgtgtggaagtatgaagtccaaaaacttggagtatctatcaaaaaattcgacagctgcaaaaccttgaacacggatgcgtttgtggacaatggtggctgtgttatgtaaaccttctg

SEQ ID NO: 154 - DNA, 382 bp, Arabidopsis thaliana
attggcaaaaatcatgtatactttgtttgagttatgaaaacttttaagaagaaactgtgttgttgttgtgctcctttgatttagcgagtttagcttgtatgagtttgtccaagatcggtggctccaatggaatcacatcaagacatctctccgaagccgcaacgatcacctcgtcgagcaagaagtctattgcagcttcgtcctcaactgcttccttcaatggagcttttaagaactgaatatctagctgaatctgctggaacccgctccggttaaacgtttggagacggacatattcttgcaaactcttcagacaaagttttactgttgttgtaacaacggattcctgggtaaattcaaccttggtgaatatttctacttt

SEQ ID NO: 155 - DNA, 382 bp, Arabidopsis thaliana
aaacgaacatgtagagcagcaacagattatacaacattttctcaaaattcacgaaactggaacaagaaaacagatggactacacacgtgcgaacataaacaattacaaatttacccttggctcctaaaagctagctttccttaacgacgagaaattaacggagcttcctaacggcgacgtaccaacctcaatatcaaacgaatcatatcgccggaaaatctcaatcacaaacaacctcgccaccaaaacaacaaaatccttaccggcgcattgtttattccccaccgtcggagtctccgtctccggtccattcgaccacaacacatgcctcaaaagcttctctccttcttctccgacgaatctctccggcacaaactcatcc

SEQ ID NO: 156 - DNA, 382 bp, Arabidopsis thaliana
ataatcataatctaaagaaacaaaagcttataatctcatccgtacatgacagattcaaaattaagttcaggtgcgagcaaagtcatattcatatataaagctcgaaatggagggacgacctcggcatcatctctgtcatagttcttcttattccggtacggtttctattggtaaggcatgtaccgcattggccttctgaacctaggagccttcccgtatccatatggggaataaaaatacggaggcacaaagggtctgcgaaagcggtatcccattgaagggttgaaacgcccaggatgatactgtttcattccaggaacattggttcgcttaggcgagaccttcagttgacgaccatgaagctctgattcattcagctgca

SEQ ID NO: 157 - DNA, 382 bp, Arabidopsis thaliana
  misc_feature (1)...(382): n = A,T,C or G
tttgtaattagaaaacatgtttgtgaatcttgaagttaaataaataaactaagactcctaaaatctctcctactgtatgtataattgttacaacataatatcaaaatacgcatacatatatacaagttgaaagctaaagagctagtgagaattgtctgagacccaacctcccgaaaccattccctcgtcgacaggcttcaggccaccacaggatctggctacngattcaaacagcttctcaatctcanncgcacatctgatgaaggcttgtttccagaagctatatcttgggttctttattagctcaatgaatgtgattagaagtccccatggatgtggcctgttcacaattagccgttccaacagcactctagttatttgc

SEQ ID NO: 158 - DNA, 382 bp, Arabidopsis thaliana
tttttttcttcggtctcatcatcaagtttgaggccttctttagtcgcagaaacaagtttcttaccgtcatactccttcaattgtccaacagcgtattcgtcaatcgcatccaccatgtaaagtacctcgtagcctctcttcttcagcctctccaagaagggagaattctccaccgcctttttgctttcaccagtgatgtagaaaatgtccttttgaccttccttcatccttgtgacgtaatctttgaagctcgtcatttcatcaccactctttgtggagtggtaccgtagaagatcagcaatctttcccctgttctgactgtcttcatggatacccaatttgagattcttggagaaagcctcatagaatttggtgtagtcct

SEQ ID NO: 159 - DNA, 382 bp, Arabidopsis thaliana
  misc_feature (1)...(382): n = A,T,C or G
tgaagtgaaaccgtatataccattattgaacaatcgcatatatgacacaaaatttgagtcccagttttttatgatctctgatactaacaagcgtgtatatgcaatgggtgacgtttatcctgagtcttcaaaacttnncnngggagagtataaacttcagctgtatctgaggcatgaaaatgtggagctgctggaaaagttgaagcagctcactgtgtttattgaaagaaatatgggggagattcggctgaatttacattctgaaccagatggtccgttcactggaaatggtgcctttaagtcctctgttctaatgccaggggtgaaggaagcattttatctgggcccaccaacaaaggacaagctacccaagaataccccc

SEQ ID NO: 160 - DNA, 382 bp, Arabidopsis thaliana
agaaaacgcgcgttttggtggttggagcgactggatacatagggaagaggatagtaagggcgtgtttggctgaaggtcacgagacttacgttttgcagaggccagagattggtctcgaaatcgagaaagtccaactctttctttctttcaagaaactcggcgcacgtatcgttgaaggttctttctccgaccatcaaagcctcgtatccgccgtgaaacttgttgacgtcgttgtctccgccatgtccggtgttcacttccgtagccataacattctagtccagctcaagctcgtcgaagctatcaaagaggctggtaacgtaaagcggtttttaccatctgaatttggtatggatccaccacgtatgggacatgcgctacc

SEQ ID NO: 161 - DNA, 382 bp, Arabidopsis thaliana
atgatgaattaatgaagaatttgagtagaagaatgatagaaatacaacaaagttggagcaatgagagacataagagactttcagagaaacaccaaatggcttttactgcaaggctttcaatatatttctccgccaaagagcagtctctgggtcgaacctcaattcccaagtcggccagtaatggagatcttgtttcagagtcaatactcgtggcttgccgtttagatgaacagtcctaatacgcacaaactgcccgtgttctagctccttggtagcatctgcgaatgcgtttaggtcaggagtcttcttcccattaacttccacgatccattgaagcgcgtagaggccatatcggtgagcgggactcccgtgacaccatctt

SEQ ID NO: 162 - DNA, 382 bp, Arabidopsis thaliana
aagcgatgaccatggcagcaaatctagcgcgacggctgatcggaaaccgatcgactcagatccttggagccgtgaactctagctcaggtgcggctagttctgtcgctagggctttctgctcctccaccactccgatcaccgcaactctcttccctggcgatgggatcggtcccgagatcgccgaatctgtcaaaaaggtgtttacaacagctggtgtaccaattgagtgggaagaacactatgttgggactgagatagatccgagaacacagagtttcttgacatgggaaagtctcgaatctgtgcgtagaaacaaagttggtttgaaaggtccaatggctactccaattgggaaaggtcaccgttctttgaacctgactct

SEQ ID NO: 163 - DNA, 382 bp, Arabidopsis thaliana
aatcggagaggggaatacagatttgagatgcaaagtagctccagctccggtggtgacgaccttgaaaagcagcagcagcagcagcagaaggacaagtctccccagaagcagagcgagtcagccaatgaatcgaaccacctcacaatcgttgtctgcaatggagattctagtcgggaagaattggtgggtcagatcccaccggaaaaggaggttagcttatccagaaacggaagctcgcacgagcagtgcagggtttgtctacaagacaaagaagaggttttgattgaactaggttgtcaatgtcgtggtggtcttgctaaagctcacaggtcttgtatagatgcttggtttcgtactaaaggctctaaccagtgtgagatct

SEQ ID NO: 164 - DNA, 382 bp, Arabidopsis thaliana
atatatataaactccttaccactctctttttttctgattttttgacgttaagagatagaaacagggagagatagagagatagagttatggctttggcgatgatgatccgaaacgcagcttcgaagcgaggaatgactccgatctccggtgatttcggtggtttgagatctatgtcttcatggtggaagagcgttgagcctgctcctaaagatccgatcctcggagttaccgaagcttttctcgctgatcctagtcctgaaaaagttaatgttggtgtgggagcatatcgtgatgataatgggaagcctgttgtcttggaatgtgtcagagaagctgagaaaaggcttgctgggagcactttcatggagtaccttcctatggg

SEQ ID NO: 165 - DNA, 381 bp, Arabidopsis thaliana
cccttttttttttttttttttttactgttgtaaagtctataacaaaaaatgcttacaaggaaatcttaagccaagaattgtgatattttcttcatcacagcagataaaaactacacactgttgctgtccatcttttcatataattagatcttttcacgcgccattcattgtgttatccgtgtgaactccgttgctgtcaatcttcccgttcacctgagccctcggtctccaatcagcagggtcaacaccgtttccattcaacagcttgtggttctcttcttttgttctgtcttttgagattactgggagcaacacagcagtccgatctggtaattctggtaatttcttgtctagacagaacaccaccaaattcaccggacg

SEQ ID NO: 166 - DNA, 381 bp, Arabidopsis thaliana
ccaaaattaataatttatcatagtataaaagctagacagtttatacatcaacacatcggataagcaaagatatactttacatatagtgattgcaatttgcaaataacacatcaaacatgtaaaaggactacacacacatgtcacatgtgtatcaccatcattagacatgtaagatcatgttcttgaattcttcaaagtcaacaaaaccatcaagattcttgtcatgaactcgaatcattctcccacaatcccaagcctttgcctcctcctcaaaccctagccgttccaacacatcacgaagctcctccgctgaaatataaccatctccgttcacatcgaacacattaaacgccctcgcaatcgcttcatcattatcagcaa

SEQ ID NO: 167 - DNA, 381 bp, Arabidopsis thaliana
cagacccaaaaaataaaaaattccaattaaagttctccaattggagttgattctgcccttattagagagatctgatctttccccaattccataacccgaaaaatggaagaaatcgccgataaaaccttcttccgatactgtctcctcactcttattttcgccggcccaccaaccgccgtccttctgaaattcctccaagctccttacggtaaacacaaccgtaccggatggggtcccaccgtatctccaccgattgcttggttcgtcatggagagcccaaccttgtggctcactctcctcctcttcccctttggtcgtcacgctctcaaccctaaatctctacttctattctctccttatctcattcattacttccaccgc

SEQ ID NO: 168 - DNA, 381 bp, Arabidopsis thaliana
  misc_feature (1)...(381): n = A,T,C or G
tctgatcttgaaatgttgccaacgcttcttgagagctgcccaaaacttgaatctctcatattggtaatgagtagcttaaacccttcttgagagctcctatttacacatattgtttgagataacctcttatatgtatctctctactcaatttgttttcttttatttattcttttgttcctgtttttgcaggaaatggtcaagaaccaatccacgcgacgtcatggggagaagcgagaaccaaatgtgatggtttcaacagtgccttggtgtttggtatcnnngctcaagtttgtggaattgaaacgttcaatcccaaggtatgaaggagaaatggagctagtaagatatttcctgacgaattcaacagtcctgaagaaatta

SEQ ID NO: 169 - DNA, 381 bp, Arabidopsis thaliana
cgtgtcaatggcgttgaggttaagaagttgaatgttcaaggacagattgtggatgcttttggagcttccatggttgagccttggttggctgctcacgccgatccttccagatgtgttcttctcggggtgagctgtggtgggaacatagcagactatgtagctcggaaagcagtggaagctgggaaacttctagaaccggtgaaagttgttgcacaggttctaatgtacccctttttcattggaaacaacccaacacagtccgaaataaagctggcaaactcttacttctacgataagcctgtctctgttctagcctggaaactcttcttaccagagaaagagttcgactttgaccacccggcagcaaacccacttgcccat

SEQ ID NO: 170 - DNA, 381 bp, Arabidopsis thaliana
acacttcagctgcaaggttgggagaaacgtgtggatcggtttaagttaggagaaggtgtgatgcctgcaagtttcaaggtgcttcatgatcctatccgtgaaacggataacattgttgcggatttcggtgagagtgctattggacgtgtggctcctgtagattcagggttctggtggattattcttcttcgtgcttataccaaatctactggagatttgactctctctgagacaccagagtgtcaaaagggaatgaaactgatcttgtctttgtgcttagctgaagggtttgacacgtttcctacactgctttgtgctgatggatgttccatgattgatcgaagaatgggtgtttatgggtatcccattgagatccaagcg

SEQ ID NO: 171 - DNA, 381 bp, Arabidopsis thaliana
gcggccgccttgttttgctatccgccgccgtagctttgctcttcgtagccgccgtcgccggaatctctgccggagcttcaaaagccaacgaaaaacgaactctatccccgtcgtctcacgccgtgctaagatcctcatgcagctccacgcgttaccctgagctctgtatctctgccgtggtaactgccggcggcgtcgagctaacgtcgcaaaaagatgtcatcgaggcatcggtgaacctaacaataaccgccgtggagcacaattacttcaccgtgaagaagctgatcaagaagaggaaaggactgacgccgcgcgagaagacggcgcttcatgactgtttggagactattgatgagacgctggacgagctccatgaaa

SEQ ID NO: 172 - DNA, 381 bp, Arabidopsis thaliana
aggcgctcctttcttaagatacttgagagctgcgtgacacatgttgaatgttcctaccgcatcaatgtctaagactgttctgaagccattaggagacaaatcctcagcagcagccagaaaattcccagcagcggcgttaacaagaatatcaagtttaccaaaatgctgataagttgcttccacaactcttctcgcatcttcttgcttacgaacatcaccttccaatccaatagcctggattccaagagatcgaagagcagagacggcgtcatcgaggacttgttttcgtcgtcccatgatagcgatagaagctccatgtttgccaaactgagaagagatctcaaaaccgataccggatccaccaccggtgatgagagccac

SEQ ID NO: 173 - DNA, 381 bp, Arabidopsis thaliana
  misc_feature (1)...(381): n = A,T,C or G
aaccatgcggtcaaaagccagcctagttacatcaaggcacttctacgtagggctgcttcatatggaaagcttggtaggtgggaggatgcagttaaagattatgagttcttgagaagagaacttccaggagacagtgaagttgcagagtctctagagagagcgaaaacagtgctaatgaacagaagccaagaatctaaaagcctaggtttcaataatgaagttgaagcggtttngactttggataagttcaagaaatccgtagcacttcccggtgtctctgtatttcatttcaaatcatcatcaaaccgacaatgcgaagaaatttctccattcatcaacactttatgtcttcggtatccattagtacctgcccgggcggcc

SEQ ID NO: 174 - DNA, 381 bp, Arabidopsis thaliana
ttttttttttttttttttttttttttttttaggcaaaaccataatataataccaacatttgttttttcttccttttttacataattcagaaacacgatcccacaccttcattactattactacagctagcactaccctcaaagcccttggtcctgaaaatcacactaaagtctttgaacaaaaaagagttactttcatcaaaatgataaatactagccaagcaagcgagagctttttccttcttttgacagatcccgttttacttctttactgcacaaatcctacttagattccatctccaatgcctttttacttacctttcatgagtcacaaaagtctagtagtgggaaacagagcaaaatgtcaatcatcagctgggga

SEQ ID NO: 175 - DNA, 381 bp, Arabidopsis thaliana
  misc_feature (1)...(381): n = A,T,C or G
ttctggtttggtggctacggttaaccgtcaacaaccggttagtgttagtgattttgatcagagatcgaggtatttggatttagctcttgcggctatggatgagcttgtgaagatggctcagacacgtgagccgctctgggttcgaagctcggattctggttttgaagtgctgaaccaggaagagtacgacacaagtttctctcggtgtgttggaccaaaacaagatgggtttgtctcngnnncttctaaagaagctggaactgttatcatcaatagcttagcgctcgttgaaaccttaatggactcggaacggtgggcggaaatgtttcctagtatggtctcaagaacttcaaccacagagattatctctagtggcatggg

SEQ ID NO: 176 - DNA, 381 bp, Arabidopsis thaliana
gcggccgcggcgattcgaggagtttccatggtggaacagaaaccctagagcctttatgctgccactaattatcactcttcactattgaattggggatggactcagagaaaatcctcaatccaagacttgtttcgattaatagcaccagccgcaaaggtatgtccgttgagttgccgcagaaaccgccgccaccgccgtcgttgttagaccggtttaaagctttgcttaatcagcgtgaagatgagttcggtggtggtgaagaggttttgcctccgagtatggatgagattgttcagctttatgaggttgttttgggtgagcttactttcaattctaagcctattatcactgatctcactattatcgctggtgaacaacggg

SEQ ID NO: 177 - DNA, 381 bp, Arabidopsis thaliana
  misc_feature (1)...(381): n = A,T,C or G
ttcagcttaatatgttaataaaaactataggttatacaaatacaagacaaaaacgcaacgcagcgttatgcctcttcatcaaagcatctggttccgcttcgcctccccagacgccacatacattttgattttctagtgtagtagtagtagattcgtaattaatatattacaattatagtgtcgaacctccagacttcttcaactacgtgccgtttttnntataacgaaccgacacacatcactgtcgttttgaacaccacgtcatcatctccaancnaggcggacttcacggggcccggcgacgagttcactgggtttccggaacgaaacgatgtgacttccggccataaacgccgtgactcgctccgagactcgtatatc

SEQ ID NO: 178 - DNA, 381 bp, Arabidopsis thaliana
  misc_feature (1)...(381): n = A,T,C or G
gacagagaacgatgagcaccctaagatctacaggatgaagctttggggtagaaatgaagtatgcgccaagtccaagttctggtacttcatgaggaaactgaagaaggtgaagaaaagcaacggacagatgcttgccatcaatgagattttcgagaagaacccaacgaccatcaagaactacgggatctggttgcgttatcagagccgaactgggtaccacaacatgtacaaggagtaccgtgacacaacactcaatggtggagtggagcagatgtacactgagatggcttctcgtcatagagtgaggnncccttgcattcagatcatcaagactgcgactgtccctgcaaagctttgcaagagagagatcaccaagcagtt

SEQ ID NO: 179 - DNA, 381 bp, Arabidopsis thaliana
gaaaaatgttttcgacatttctgagcaaacatttaaacaataagtactatgagtctgatagtactcgagaggcatcttttaacggaggagactacatcacttttagaggaaaactcgagggagatgcgtatttcacaacaaggctcttcaaatcccatcttcatctttcatcttcccccatcacaatttctttctctgtgacatcagatgaaacctctaaacatggaatcctgctttctttctcatctccatcacacgagacgaaatccattctcgtttcacgacaagaatccatctgtagattcaacaacatgttcttacagtgtctcgccacgtcagcgcagactgtatccgagtggacagtacaggagacaagccttg

SEQ ID NO: 180 - DNA, 381 bp, Arabidopsis thaliana
  misc_feature (1)...(381): n = A,T,C or G
aacgatcggggaaattcgagctcggtacctcgagcggccgcccgggcaggtactgtccggctatttgatgccacaaactttgccttgctcaacagtttcgcctttgattggtcnnnaataacatctccaccagtccagatggtaagctagtggctgttctaggagacagtccagagtgcttactagcagataccggatctggaaaagtgatccacggactcgaaggccatctggactactcgttttcatcagcatggcacccaaacggtcaaatcttagccacgggtaaccaagacacaacctgtaggctatgggacgttagaaacctgtctcaatcactcaaagtgttgaaaggaaacatgggagctatcagagccttga

SEQ ID NO: 181 - DNA, 380 bp, Arabidopsis thaliana
ctttttttttttttttttttttttgtaaactaaacaatctttgcttttttcaattatttgtcacatggtataataataaagcaattttacattcaacacatcatttataagaaaaaatcgactctttgaatttctaattgcagccttcttgacgtacacgtcagcaagtttaagaatggtgagaggccaaatatgatttttccgacctgatcaatagcaaatctgagctccgttaccaccaatcaatgccgtgaaacactgaaaaccgctggactcgagctcctccaccactttgtccaccaccgtcccggttggtaatagagtgaggacgcagccgccgccaccagctcctgtaagtttggagacaagcttgtgcttga

SEQ ID NO: 182 - DNA, 380 bp, Arabidopsis thaliana
  misc_feature (1)...(380): n = A,T,C or G
ttttttaaaaagataatccccattacattagatcacaaattaggtcgaaaaaagaataactagcagagctttacaaattacaaaccataaggcaaagaagagtgcccacaacacaaattaagttgtagaaaagaaatccacatccatcatcatcattatcatcctaatgtaataataactcgatataaaaaataagaaatattannngagagaagaaaaagaaaacactaccataaaccaccaaccaaaggaatcatcatcagtagagagcgaaaaggccaccaaccaagaacacatttcagatttcatgaaaaatattaatgaagccgaagtggagcagtgaaattttcgtctaccaaccgtggaagaagaaggaaaag

SEQ ID NO: 183 - DNA, 380 bp, Arabidopsis thaliana
ttttttttgtaaaaaatgttatttccattaatataaattctgcaaaactctttaacttgtcgagtaatgcttcatacataaatgagaaaccgttccgttaaataaaattaagcatgaaattatttagcaataaaagagaaacaaaggaacactgcccaattaaaacaagggcaagttcagaaataagcaaagaattgcgttttgaccagagcacgacttagttttgtagttaaacgaattgtcttcctcgagaagagaaggtttggccaaaccaccaagaagaagggacaacgttcaaaaatgtctgcgttttgctgtccgtcagagtaactttgaaggagagtctctgtccccggagatcaccggagctctgccagttg

SEQ ID NO: 184 - DNA, 380 bp, Arabidopsis thaliana
  misc_feature (1)...(380): n = A,T,C or G
cggccgcccgggcaggtaccctgtaactctaccgtattgacctgctcctccactttgcttcttatgtaaataatcaaactctgcccgctgagtaatagtctccctaaaattgacacggggtttgcccacagtcgcatcaaccttatattctcttcgcatgcgttcaacatagatgtccaaatgcaattcccccataccagaaataatcgtctggccactctcgggatccaaacccacacggaaagtaggatcctctttctggaatcnattcaatgctttcgagaactgtcctccagaatcttttgaaactggttgaacagctaaggacataacaggttcaggaacgttcatcgatgtcattgtgtacctcggccgcgacc

SEQ ID NO: 185 - DNA, 380 bp, Arabidopsis thaliana
tctgccgtcagctctgtttgttgaagatggttatgatgcttacgttaagctggccatattgtttacaaaggccaatggaatcctagtgaatagctcctttgatattgagccttactctgtgaatcattttcttcaagaacagaattatccttctgtttatgctgttggccccatatttgacttgaaagcccagcctcatccagagcaggacctaacccgtcgtgacgagttgatgaaatggcttgatgatcaacccgaggcatcggttgtattcctttgttttgggagtatggcaaggttaagaggttctctagtgaaggaaatagctcatggacttgagctatgtcaatatagattcctctggtcactccgtaaagaag

SEQ ID NO: 186 - DNA, 380 bp, Arabidopsis thaliana
taagttacagcctaatagagagttgcgtgagagggtacacttgaagcctatgagtcctttggtggctgagcaggccaagaagaagagtcctcccgggagcccggttcagaccgatcttgttcttggacgagcagaggattcggagaaagcaggagatgtgcaagtaagagactttctcggctgcatatcgtctgaatcagtgcagaacaataataacatcagtgttttgcaaaaggagaatcttgggaattcgttagacattgatttgtttaagaagctgttgaagggaatgaccgagaaagtttggtggcagaatgatgcagccgctgcggtggctgcaactgttagtcagtgcaagctcgggaatgggaaacgacgcg

SEQ ID NO: 187 - DNA, 380 bp, Arabidopsis thaliana
tctatgctttggacttcgatggagttctctgtgatagttgtggagaaagctctctatctgctgttaaggcagccaaagtgagatggcctgatttgttcgaaggagttgattccgctttagaggaatggatcgtcgatcaaatgcatattgtgagacctgtggttgaaactggctatgaaaatcttctacttgtgcggctgttattggagaccaagataccgtctattcgaaaatcttcagttgcagaggggttgacggttgatgggatactggagagctgggcaaagtttaagcccgtgatcatggaagcttgggatgaagatagagatgctttggtagatttgtttggaaaagttagagatgattggattaacaaggac

SEQ ID NO: 188 - DNA, 380 bp, Arabidopsis thaliana
  misc_feature (1)...(380): n = A,T,C or G
gcggccgcctctaatgccggaatatcaatgaccaagcacctaccacagtgatgaccttttaagttcaaagagttaattcaaaaacaaccaagaaagcatgaaccaacattttggaacataaatagtctatgaaaaagtgaacaagctttcgaacattttnnaaaagtaactcaaaacaacacgacttgaaatatacccatatcatcaaaatcaggcttcaacttcggatttcttatcctctacagctacattagtagaggaaaccccattagtctctgctcctgcatcagtgttctcctcaggtggctgaacctgttcatcttcagnnngtggctcctccacataatcattgtcaaatgcatcagccggaacttcgtaaa

SEQ ID NO: 189 - DNA, 380 bp, Arabidopsis thaliana
cttttttttttttttttttttttttttttttttttttttttttttttttttttttttttttttgaaatctcaaacccggtttgtgtcggttaaggagtagtaaagcaaaagagagtttgtgatgtcaaaataaaacacatacacatagttcacttaaaagtttctgcaagagacagatccgatattccagatatcagatcatcgatattgctcttctctgatacaacttgatcatcattcagtggctgtggaaggggctggacagtggaagactcatcgagggccttcttcagctgcagcaccaacccatcttcctcatcattgtcccccaaaacctctagatcccacactttgaaaatctcttgtgaagttactttgac

SEQ ID NO: 190 - DNA, 380 bp, Arabidopsis thaliana
ttttttttgtgctgagaaaatggatttataaacaaaaagattcaaactttagattacattagaagaagaagaagactttatttgctcccaggatcatcttgagaagataagcatgaaagaatgaagaaatatttcacaagcaaacatacaagtactgaataaagtaacggtctttgattttggttcatggccgttgataaacgtattttgttcttgggtcaacgattagaccttttcctccgttaacttcaagatcatgctggaaaacaaagtctgggattgtcagctgctcacgaggaacgtatttgaacagctgcagaagtcggtctgcatatacaactttcttccataccacattatccacgaaaaattgcatcgtt

SEQ ID NO: 191 - DNA, 380 bp, Arabidopsis thaliana
  misc_feature (1)...(380): n = A,T,C or G
tagagcggccgcccttttttttttttttttgataagagtctcacttttgagttaattaagacaaaaaaaagtttacaagtaacaaaaaacaaaattttgcatgtgtaaccaaattactcagcagaatctgactcgtcttcttcatcattttctgacactgcgtcctcatctgcgtcagagtcactttccactccatcttccgacaccgcgtcctcatcttcttcagcatcagttccgttttcggcgtctgtttcagttgactcttttgctttcttatcatccttgaggtctttctcgtcatagaagtcnctttggacaggaacatctttctgttgttgggtagacatgattccagcaatggctttcaatgcagcagctgc

SEQ ID NO: 192 - DNA, 380 bp, Arabidopsis thaliana
  misc_feature (1)...(380): n = A,T,C or G
gcggccgctgcatgtatacggaagggttgggtggctcgtcaatttgcaaaactggtcatattcaccggattcatgggatttataatagaacaatatataaatcctattgtcaggaactcaaagcatcctttgaaaggcgatcttctatatgctattgaaagagtgttgaagctttcagttccaaatttatatgtgtggctctgcatgttctactgcttcttccacctttggttaaacatattggcagagcttctctgcttcggggatcgtgaattctacaaagattggtggaatgcaaaaagtgtgggagattactggagaatgtggnntatgcctgttcataaatggatggttcgacatatatacttcccgtgcttgcg

SEQ ID NO: 193 - DNA, 380 bp, Arabidopsis thaliana
atcctctagagcggccgccctttttttttttttttttttttggtaaacttgatttttttcgaatctattatttaataaaatccaagaaaaattatgttctttatcagaaaaaaatatacgtagtagtaacaacaaaatagaaaacaagtgtacccaccaacttaattccaaattcttgaaacatttttagaattcactgtcttcttgtgtctcagaaacagagctttgttctctgtctttttttctcttcctcacttaactctcatctttctcaatttaccagtgtctaccaccttgagaactcccgccttttcttgggaaaaatccacctttcttaggtttaggaatgtcatgaatgtccatcacctgtatagtccttt

SEQ ID NO: 194 - DNA, 380 bp, Arabidopsis thaliana
ccctttttttttttttttacttgtcaaaagtatataatcattgattccatggattattcatccctccatagttattcaaacttgattcatattcactttttacacacaacatagaattataataatactaggcattgatcacatgtaggatttgagacggggtcgcgtaagggactgcgctccatccaccaagacagtggtgcctgtcatgaagcgtgagccatcgctgatcaagtagataacagtggagtagaggtctgtgtccgggttgagccactggccgaggggtgcagcgtccttgaccagcttctgcgctcggtctcttcccacagaagctgtatactcatcatccagatgcagccctctagagatcatgttga

SEQ ID NO: 195 - DNA, 380 bp, Arabidopsis thaliana
tcgcggccgcacagagaggagatttgagattttgggtttcaatggcggtttcaagtgctttcgttggttgtccaaagcttgagactttattgaatcaccataatctatctccttcttcttcttcttcgtcctctgtttcacagacaccattgggtcttaatggggttcgtgttcttccgaagaacaatagaaccagacgaggtttgatccaaaaagctcgttgtgagctctctgcttcttctgattctgcgtctaatgcagctagcatctctgctcttgaacaactcaagaactctgcagctgatcgatatacaaaggaaagaagcagtattgttgtgattggacttagtattcacacagctcctgttgagatgcgtgag

SEQ ID NO: 196 - DNA, 380 bp, Arabidopsis thaliana
  misc_feature (1)...(380): n = A,T,C or G
tctccgttgtctatgttcttgccattgtcttctccagtcactcatgcagangaagacgtgaaaatgagtggagannnattgaaaatgggtacaatggtggatgatattaatgcttattcttatgcttacccattggattatccatctgagaagcttgtcttcaaatgggttgaatcaagaaagcctgaaagatactcttcagctgcaccactctctcctgatgcacgtttacggattgtttctgaacgagttgacctaactgacaacctcgtcatttctatttcgataggtcccccaaactcaagattaacatcaaaagaaaagaaaacatggtccgctaaagaagttgctgattctgttttgtctgataaatcagcatt

SEQ ID NO: 197 - DNA, 380 bp, Arabidopsis thaliana
cgaactcgggacctcttgcacccaaagcgagaatcataccactagaccaaatgctgtatttgaatgcccccactgaagcattgtgttgttgtgtaatcctgtggaaaagagaattcatgcttcactccgttattacaggaaattaagtcatgggggtttgtttaccttttgagggttctattcgtgatgaagctggcaacatgcattgaagctaagctgcagaagggaggtgtacgtcatcgcctcatcgggcatgtaagcaaaggttaaattgttgtgtgcgaatcaacagagagagagaaaagggcacatcaaatagatggacagagtatcctgtggacgagctagaggcggtcctagacaaggcagcaatgggaaac

SEQ ID NO: 198 - DNA, 380 bp, Arabidopsis thaliana
aacgatcggggaaattcgagctcggtactcgagcggccgcccgggcaggtaccaaccaagctcaatcaccgtaaacccattagtataaaattgttccggctctgtaacattcgccggagagtaagtctcattcgtcaagaaagcaactttacagtttcctccttgagttgtgttaccaccggagctttcaaggtcaacgccgattacttgcggtctatccgccggaatcttcgcctgacaacatgtgtaaccaccgcagatctcgtctaaacgactcttatctccgtcgcagctcgattcgcatcctgtgatctgagattcgatgtctgtaatcaatgctctgttgtcacaaccaactgagacgagacgattcgagtcgg

SEQ ID NO: 199 - DNA, 379 bp, Arabidopsis thaliana
  misc_feature (1)...(379): n = A,T,C or G
tttttttttttttgaaggatttgactgttatctttttcaactcaagaaaagaaaacagacatgaagcataaagagaatgtagtatatttcacatacatgatcttaactcgaaccgtttctatcaaacatttcagatctacggtagcgattctttctatgaacatcaaactgaagtgaagaaagcttatgcgaaaccgctgaccaaatcatattcacagaatctccaacttgcgaaggaaagcgatactcaaaacacccagcaacctctttcaatctcccccacttcttcttccactgatcctctgttatccctctnnnnatattcaccaagaactctttctttacagcttcagaagcatgcacaaacacggagaaaccc

SEQ ID NO: 200 - DNA, 379 bp, Arabidopsis thaliana
tcgagcggccgcccgggcaggtcgaatattcaaaaaaaaaaatttcttttctctttctaacaccacagatttcgcaatcgtgttttgatctgattcttccaggattctcccggtggcggagagaagaaacaaaggaaacccagaaagcatttttctcaatggcgtcgactacacgagaaaagtttgtatctttcataaacaacagatggctcgtcttcgtggctgccatgtggatacagtcttgtgctggcatcggttatttgttcggaagcatttctccggttatcaaaagctccttaaactataatcagaaggagctttccagacttggagtcgccaaggatctcggtgatagtgtcggattcatcgccggtacctc

SEQ ID NO: 201 - DNA, 379 bp, Arabidopsis thaliana
agttaacaaaagagtttactgctctatatacaaacggaccagctggtggtggtggaattagtaccggacacaagatggaaattgttcttgaaaagcgtttggtcagccgcgaatctgtaatgtggaaaactggacttcagcacaccaacacttcagagccagagacctctgaacatcattctccagagaaaatgccaaagttacctaaggaaaatccaaagaaccttacaatgagaggctatcaatctggatttcatcactctcctgctccatctggccaaaagatcccactctactctgttgcacatagccgggctggcgataaaggaaacgacataaacttctcaataatcccgcattattccccagatgtccagcg

SEQ ID NO: 202 - DNA, 379 bp, Arabidopsis thaliana
  misc_feature (1)...(379): n = A,T,C or G
tggtgtgagtgtgaggggtggttaccaaaggaaacaccggcgaggcaaatcggagactttgagagctcaatacattaacacaaaggatatcaaagtgacggtggctacatggaacgtcgccggaaaacgtccctccgatgatctcgagattgaagattggctctctactgataatccttcagatatttacattatcgggtttcaagaagtggttccattaaacgctggaaacgttttcggagcngaagatagaggtccgattccgaaatgggaatcgataattcgtagaacactaaacaaatccaataaagaatcagtttatgatcaatcgccaagctgcaacaacaacgctcttcatagatctcacagcgcgccgtcg

SEQ ID NO: 203 - DNA, 379 bp, Arabidopsis thaliana
caaatttcaatggcgtccggtgatgttgagtatcggtgcttcgttggaggtctagcatgggccactgatgacagagctcttgagactgccttcgctcaatacggcgacgttattgattccaagatcattaacgatcgtgagactggaagatcaaggggattcggattcgtcaccttcaaggatgagaaagccatgaaggatgcgattgagggaatgaacggacaagatctcgatggccgtagcatcactgttaacgaggctcagtcacgaggaagcggtggcggcggaggccaccgtggaggtggtagctacggaggtggcggcggtagacgcgagggtggaggaggatacagcggcggcggcggttactcctcaagag

SEQ ID NO: 204 - DNA, 379 bp, Arabidopsis thaliana
gatttctttggttgggatttgtttatacgtttccttcgatttcgctcgagcttcgatctgaaaagcttcgagcttttagacaaatccatggattcttcgccagtttctgctcgattcgatatattcgagatttatcgtagattctgtgctattcgatcaggacaacaattgtgtaataagaaaccctgtgatggcgaagaatctcaaagatttaacttgtctaaagaagcaataactcagctcttatatctagtagagaataagtttcaagctaggaactcgatttttgatgaattgtttaagttgatgtcacggctagacttaatggtggactttacggagtttacttgcttttacgattttgttttctttatgtgcc

SEQ ID NO: 205 - DNA, 379 bp, Arabidopsis thaliana
tcgagcggccgcccgggcaggtcttgcttcttctcctcctgctctgtctcgtttcttctcttctacttcggagatgtctgcttctgattccacttcttctcttcccgttactcttgactccatcaatcccaaggttctgaaatgtgagtatgctgttcgaggagaaattgtcaacattgctcagaagttacaagaagacttgaagactaataaggatgcttatccctttgatgagataatctattgcaacattgggaatcctcaatctcttggtcagctgcctataaagttcttccgtgaggttctcgcattgtgtgaccacgcaagtcttttggatgagtctgaaacccatggtttgttcagtacctcggccgcgacc

SEQ ID NO: 206 - DNA, 379 bp, Arabidopsis thaliana
cttttttttttttttttttgaaacaattaattttattttttttggtcactattaatttggtttctattacaacatatttacgaaattcatcgtactattaacacaaatgtgtctttctcaaaatataaactatttcgatatatcaaaacggtccaaacattcctatctatgacaattacttgatatattattctacatagtatattagattacgatgtacaggcttctttagttcctcttacacatgtacccatcaccgcaaactgagattacgccacgtgtaactcgctactcttgacgaggatctcccataaccgttggatctctgagaagacatcgtcggtgggaagctgaaacctgcagaacggacacgtgttct

SEQ ID NO: 207 - DNA, 379 bp, Arabidopsis thaliana
  misc_feature (1)...(379): n = A,T,C or G
cttttttttttttttttttacttcaacattattgtgttgatttgttttcactataccagcaaatancaatttattgccttaccaaacatcagctagtgttactacatttgtactagatagtatcaaatctaaaacagaggagttttacttggnnncttctgtccatcgtctcttcatttcggatttggatcgaacttctttaagattcccatccaaaccataatctctctccatcacaagattgattccttcatctgaataccatccaactccaatgcacaacactccatctttcttcacatccacgtatgcactcacaccacctggtagccacatcacagacacatcttgcatatctatcatctcttcctccccaaac

SEQ ID NO: 208 - DNA, 379 bp, Arabidopsis thaliana
gccgcccttttttttttttttttttttttttttttaaatcattttgaacacactcaaaagccactaacatttgttttatcgctagttttttgagccggtgtatagagaaagatacacatgcatgaaaaatgacctaaagtgtgttattgttattgttataaggactgcctatatccatcccatcctccttccggttctttcctcttcagaacaccacctgacatttgatacattcttgcttgatcctccttcgacggtacggaagcagatgaagataattgccttgatacaagtgttgattcgtctcttccctctgtttcatgacctccaggaccagaatttaagtcaagtcctgacctaaaccatttcgcgctattgt

SEQ ID NO: 209 - DNA, 378 bp, Arabidopsis thaliana
tcagcggccgcccgggcaggtacaaggagtataagctgaatgattacagctcatggtttctaaaacagcttaacaacaccagtaactggataagactaaagagttgtcttgttaaatccgagcaatgtcggaagctttccaagaaatacaagaccatcaaacagttgaaatccgcagaattaaccccgatagaagctggatgttgtcgaccaccatctgagtgtggttatcctgcggtgaatgcttcttactatgacttgagctttcattcgataagttctaacaaagattgtaagctttacaagaatttgaggactatcaagtgctacaactgtgattcttgcaaagctggagttgctcagtacctcggccgcgacc

SEQ ID NO: 210 - DNA, 378 bp, Arabidopsis thaliana
cttttttttttttttttttttttttttttttgttgttacccagagcgttttacttgttgaatctaaagcccaaatgtacaacaaaatctggaacacgcttttaaacctaaagttttaaactcatcagctaaaactctctttacatatatattcttacacaagagtgcgtcgtcgatgttacaagctgctgacattaaaatacctcatggctcttttgccaaaataggctttcacttgcttcttctcacaagtcttgagttttttttttaagttttatcatttccaatctactggttaacctcgtctatcctccataagcattcttttctcagcggcgaatctgtaaatatagctttgatgaaatcttgtacctctgtt

SEQ ID NO: 211 - DNA, 378 bp, Arabidopsis thaliana
tcgagtacacaaaaggaagaagctaagaaccaatgtgtttctttattttcatggaatgagttctcactaatgggaaacttagatgaggcaaatctacctcataagcgaaagacagacatctgcacaataatgtacacaagcgggacgactggagaacccaaaggtgtaatcttaaacaacgcagcaatttcggtccaggttttatccatagacaaaatgcttgaagtcactgatcgatcgtgtgacacgagcgatgtgttcttctcgtacttgccattagcacattgctatgatcaagtcatggagatttactttttatctagaggctcctctgttggatactggcgtggcgacattcggtacctgatggatgatgtt

SEQ ID NO: 212 - DNA, 378 bp, Arabidopsis thaliana
  misc_feature (1)...(378): n = A,T,C or G
caccataaaagagaagctaaaggaccgcaaaaacgctcacttcatgttggttgacggaatgtctangctactgacggaaaaagttaagaattgtcagtcattggatttccaagtttctggtgtcaaatggaggttggttatacgcttatctaggggaagaaaagaccatctatcttttgttctggagatcacagatgaaaagtgtaccgggtctacttgggacgtcaaattcaacttcaaaatcggcatagtccctcagactggaccagattattgcttcgttttggtggggcatcaaaacgaaaaaaaacgtagtcaagggttagccaacttcatatcacacacggatttgaaggagaggtttcttgtgaacgacaa

SEQ ID NO: 213 - DNA, 378 bp, Arabidopsis thaliana
atctcctgaagtaagggtcttccggggtcccagacgtgttgaaaatgatgtatctgatgtgaatataagacaaatagaagcagatgagatactggcccgtgaattacaagaacagctgtaccgagaagagtcgttgatcagacacgagcagatcgatgaaatcatagccaggtcgatggaacaagaagagaattctctccgggcttcttctagtcgtgcttctactcgtattacccgaagctctaataccatcgcagcaaatccacgtgggagaagtcgcctggaagcacgactgcaacaacattcttcaaggaggcgattcaatcctccacaggctcgtgctcctgttagagcaccagcacggggtcgaggttatcg

SEQ ID NO: 214 - DNA, 378 bp, Arabidopsis thaliana
  misc_feature (1)...(378): n = A,T,C or G
gctcatttctcaacgcctttaatcaccgctagattagttcctagatgtatcatccatcgagcttcaatctccgccgtctctttttccaccgtccgccgtcgattttctcctctcaccatggcctcagcagctcagtcttcttctcaggctgtgtcttacgggagtggcaacagtgatacagatgtttttaaattgattcaagctcacgaggagaaggctnctcgtctttccccagtcgaagaaatccgaactgtgcttaatggtagcatatgcggtangctttccactttttctcagaagtatgagggttatccttcagggtcaatggttgattttgcatgtgatgctgatggttctccgattctggcagttagtagc

SEQ ID NO: 215 - DNA, 378 bp, Arabidopsis thaliana
gcaacgtattacctctgatcgcttcacctttcgcggtggtggtggtggcgatgccgccgccgtcgtctcctcctccggcctccgtgatctcgttttcgtcgtaaaccctcaaggtgctaatggtagaacagctaaagaatggaagaagttgcttcctcaccttcgatctcgtcttggtaaagactgtaatgtaagtgaattattaacatcgggtccttctcatgccattgacattacaagagaggctataagggatggtgcagatgctgtcattgcggttggaggtgatggaacacttcatgaggttgttaatggtttcttttgggaggggaaacctgtcggttatctcggtggggaagctagtcgatcgactgcact

SEQ ID NO: 216 - DNA, 378 bp, Arabidopsis thaliana
aatctaatcgaaaacctactggatctcgcggccgaggaggcattggaggtggcaataacaccggtggtcgcggtggttccggttctaattccggtccgtctcgtcggtttgctaaccgcgtaggagccagaacggcgccgtattcaagggtcagcccattgattttatatctctccctttaccttctcttccttcaagaatcagagaattccttttagggtttttgtgaaatcaaaaaaagctgagatctgttttcgtttcttctttgacgaataaaacagccgattcaacaacaacaagctcatgatgcgatgtggcaaaacgacgtcttcgcgactgatgcgtctgtggcggcggcttttgggcatcatcagactg

SEQ ID NO: 217 - DNA, 378 bp, Arabidopsis thaliana
tcgagcggccgcccgggcaggtacccgttactaaagaaggcaagccacatgttgggtgctattcctgctccgcttgcaaatgcttctgagttccctacaaaggatgcagctatccggttacacgcagcacaatcatcaggttcagttcatgtaaccgcaggtatgatcacgatatcagacagcaacatgggctggtcatacggcaaaaacgagaaccttgacttgatcctttctttggggttggtccaagggaataccgcccccgaaaaatcagggaatagttcagcatgggcaatgttaatattcatgtgtttctgggttcttctactctcagttagtttcaaagtgagcattttggtctcttccaggtgataggta

SEQ ID NO: 218 - DNA, 378 bp, Arabidopsis thaliana
ccagcgaagaggctcatcaatttgcttgtactcgctttaaggctgaataccctgttttccaaaaggtgcgtgtaaatggacaaaacgctgcaccagtctacaaattcctcaaatctaagaaaccctcttttcttggaagtcgtatcaaatggaacttcaccaagttcttggtcggcaaagatggtcaagtcattgatcgttatggcacaactgtttcacctctatccatccagaaagacatcgagaaagcccttgcacaagaattgtgaacacgcacagagatatttgactcctttggaagaaacttctctcatactctcggtcatgcagtcaagtttctacatttcccattgcaccttccatatgggccttgtattc

SEQ ID NO: 219 - DNA, 378 bp, Arabidopsis thaliana
tcgagcggccgcccgggcaggttgatgatcaagaccacaatggtttccctttttgctctagcggcggttctcctaatgattctagccccggcggcagaagccgtgacgtgctcgccaatgcagctaagcccatgtgcaacggcgataacgtcgtcttctccaccatcggctttgtgctgtgcaaagctgaaggagcagaggccatgcttatgtggttacatgagaaaccctagcctccgtcgcttcgtcagcactcccaacgctcgtaaagtctctaaaagttgcaaactccccatcccaaggtgttaaaaagtcagaaaagtgtttgctgtttatgatcatcctatatatgtttgaatcctacttttggtgtgtgtt

SEQ ID NO: 220 - DNA, 378 bp, Arabidopsis thaliana
gaaaagaaaccaagaattacatacacgaggaagtttcttatatcctcgagcggccgcccgggcaggtacgaggcttcaggggagagtaacaacgctgagaacgatgcttgcaagtgtggatctgactgcaagtgtgatccttgcacctgcaagtgaagaagcctttttaaataagcagagataatcgagtctctttaattaattaagttattcaataagtaaaccatatataggatggtgtttttaggtttggtttatgtgtaataatggcttcagcttatcttttagccgatcattgtcttttgtgtttgttttgatcatatcttttagatgtctagcaactctgccatgtgatgagcttgtacctcggccgcgacc

SEQ ID NO: 221 - DNA, 378 bp, Arabidopsis thaliana
  misc_feature (1)...(378): n = A,T,C or G
ataacattaataaccacaataagattacacttgacgttatattataacgaaccaaataaaccatccctcggaccaatgtcctcttgtgatccgattttcggtccactacattactaacaaataaaagtaaaaataaagaaaaaacttccttcatttttatttttacttaaactaacacactcgtcgttactaaactagagttgaccataggcgtgnnnaaataggcaagagctccaacgagtggtgaattgatgtaagtagccggctcggactgctcgtaatcagaccgttcgtctgggaagcgatcatgctggtcgggaccaccaacgactgcaccaacaaggaagttagggtttggagattgagagttcatgattg

SEQ ID NO: 222 - DNA, 378 bp, Arabidopsis thaliana
gcggccgctttagtttttagagttaaacattttgattttgatttttacatccattcttttggttttacaaacatgaatcagcatattaaaatgtcaattgatataccattgttatgtagattgtgtaattttatgatcgccacaccctccctctgcgtccccttttttttccggcgtctctctatcgagagagatatcccgattggcttaatctcatcagcttacatatagtttggtatttttgaacctctcaatatttgtgttaaacattttgaataaatatgtgcagaattaaagtcgactttatggaagatccaaagaaataaatatcaatattatatagcaatatatgtggagtagatttcaattgtttttgtt

SEQ ID NO: 223 - DNA, 378 bp, Arabidopsis thaliana
  misc_feature (1)...(378): n = A,T,C or G
ttttttgcttaattcgttctttagttataaagctaccaattcatagattcatcccttttcacttttcagtatatatannngaaaaagcagataggtggcattcaaatatttggtaccccatagatttttgttgggcgtaagtgttgaccgttcagcttgctcttaaattacctgagtggctaatctaacgacccatgtaaggaccaccatacccagcaccatgctgccctcttcccgcaccgccctgaccaggttgctgagtctgataaccgccctggtacccggcttgagcaccgtacccaggatagaccccaggtgagatatttgcttgagtaccatagccacttggcattccacctacagctcctgggctagctg

SEQ ID NO: 224 - DNA, 378 bp, Arabidopsis thaliana
tacacagatattttatagcaagcacaccctctattaatcacatttaggacacatatgatatgcacctgacatggaatttcaaaaggaatagtgaaaaccagtgataatatcgtctcaatccatgtcagctttcttcaactattccgtctcatctcttcgtgttcgatctacctcgatatccaactagtcttcttactcaatgtgtaccaacgttcatttgattgaacataggaatgtaaagacaccaaaatcacatacagtttcaaaagattcagtcattgttattggcaaagtgaacaaaacatctactttcatatgcatagttgttcaggctgaagcaaagaatcaaagcgactcttttccagtttcattctcctg

SEQ ID NO: 225 - DNA, 378 bp, Arabidopsis thaliana
atggaattagttgaagagaccattccaaaagaagggaaaaagatgggagaaagaattgtggtcgacaaagcttatctttaccaagaagacaaaccactcaccgtctgcaagacttctctcttctacaccggcgatggcttcgccgcctatgactgccgtggtgatatcatcttcagggttgattcttatggacctgacacaagagataacgatgagattgtcctcatggacgcgaccgggaagtgtctccttaccgttaaacgaaagagaccaactctacaccaaagatgggaaggttttctcggcgagagatcggaaggtcagaaaccgatattcagcgtccgtagatcgtcgataatcggacggtgtacgatggaa

SEQ ID NO: 226 - DNA, 378 bp, Arabidopsis thaliana
atgttcaggttcaattactccaaggagtttctaaggtgggcactacgtccaccgggttattaccagagctggcatattggagttcgagccaagacttcgaagaaactcgttgctttcatcagcggcgtgccagcaagaatcagggtgcgtgatgaggttgttaaaatggcagagatcaatttcttgtgtgttcacaagaagctcaggtctaagaggctcgctcctgtcatgatcaaggaggtgactagaagggttcacttggagaacatatggcaagcagcttatactgcaggagttatccttcctacaccaatcaccacctgtcaatactggcacaggtcattgaacccgaagaagctaattgatgttgggttttca

SEQ ID NO: 227 - DNA, 377 bp, Arabidopsis thaliana
ttttttttttttttttttgagtattcgaaataggattcacagaaataattcaaatcgtatttggatcatgaatatgcactaatatgattaacaaagagcaaacaaaaatgacaacttgatcaaaacgtccttccgactttgtctccccatatcttttttctttctatattaaaacctaatcatgttatacattaggaccatcacatgttcttctctttaatccccaaacttctaaagagagagagagcgaaagcgagagaagagcactaagcaaagacttctttaatcttcttcttctgatcgtcagtgagagaagacggaaacaaaacctcaaaagtgacaaagaggttgcctttctttgtgctgtagtgaagtgg

SEQ ID NO: 228 - DNA, 377 bp, Arabidopsis thaliana
tcgagcggccgcccgggcaggtcaccatcgattttttgctctcttgaaatgtgtctttttaggtccaattcttctcttccaactaaaccgaaccggaaaaccaggttcggagatcggtgtttactgatggccaaacagcaacgaacccgactttacatactccgaagatgtgtctccatgctgctttgctggcacgaccactctatttctgattagtttgcagtcatgaaccggactgaccaagaagtagcaatcagaagaatgtgatgtcatttagagttttttcttgttttcttttagaactctcttcagggaatcttttgtaattgaagaagactctaaggattgggccttttgggccttgtacctcggccgcg

SEQ ID NO: 229 - DNA, 377 bp, Arabidopsis thaliana
tcgagcggccgcccgggcaggtgtcgccgtgcacttccccacctcttccggcggatatgatgagcattgtatcaagtcatcatcactgtcaacaatctgttatacacgaacgtagcggtataggaacaatatctaaggtttcttgttcgagatattgcggtccgtgtttctctggacgactggctttctctcatagcctctgcttgaagactacttatgggaaaactgataggagaaagttttcaagaatttgcagtattgtggatgatgaggggaatctagataattcggatgacgaggaaaaggaatcactcgatgataaaactaaaaggcaagcgaatgatatgaatcgggctaatcttgaaagaatggttggg

SEQ ID NO: 230 - DNA, 377 bp, Arabidopsis thaliana
aagaagaaatatcactaggtgcaccaaccaattccacccttatccaatcaataatacaaagcagagattttgtttatccgtgactttctacttttgttaacttgttattgtcgtgtattgaaagacaaccaaaaaaattatgaagaaaatgattttaataagaaagaccatgacgagccacttcgttgtccagtttcatcgacgcgaacctctcgtcgttgcatttttttataaacgcttctactttccggttaagctcatccctactccgtgacactttcaccttcttcaccttcactagcggcggaggtggcggcggcagagactggtaacagttagttctgtcactaaacgtctccgatttcttcaaaacacct

SEQ ID NO: 231 - DNA, 377 bp, Arabidopsis thaliana
  misc_feature (1)...(377): n = A,T,C or G
agctcggtacctcgagcggccgcccgggcaggtgttactataaatctttaccgatgccaatgacttcatacaagtttggatccgtcgatcccatttctggaannnnactttgatgacaatggacagtttgtgtcgagcgtctgttggaggaaaaaatcgaatatgcttgtagctgcaaactctactggaaacatgaagctactaaaacttgtttgacaacttggccttttcgctactactgcgggcattggactttttgagtctgaaactaggacaaagcaggtctgactttgaagcaaacgtttttgtcctggaaactatgatcccatatgaccagaagagaaaaaaagttcgaaatcttggagaagttgaagaag

SEQ ID NO: 232 - DNA, 377 bp, Arabidopsis thaliana
  misc_feature (1)...(377): n = A,T,C or G
tgacgtcgcatgcacgcgtacgtaagcttggatcctctagagcggccgccctttttttttttttttnnnnaactattttattagttttttcataatagctactaaatttttatgcataaacagataaaaacacaaaaggaaaccaagtaagagaacgatgatccagcacgccgccgtctccatagccgtttctttccctcgccgccacttcatctccgccttcgcggtcttcctctccatatattctatgtacttctctttcccttcttcttcccctcccgccctaaacctacgtttcatccccatggccgcaaccaaaatttccaaactacccttccctcctaggttcctcccatccttgtcctctcctactaggc

SEQ ID NO: 233 - DNA, 377 bp, Arabidopsis thaliana
  misc_feature (1)...(377): n = A,T,C or G
ttttttaaagcaatgagaagtttattgaagagtgagatggagaaatctgaaaccttttcattggttcttaacaagactggatccaagattgaagagatcaaccataagttgtcgtctttagaagctgatcttaaagttgagagatggaaggcttctcctttctctgatcatatccgtcacaccattgctccaatatccgctgtcctgagagtctttgctacggttcaagagcttgagagatctctcgtgtcctctgatggagtnnttggttatgtttcggatgttaaacgtcttggagaagcgatgaagcttctctccagtagctgtgttcttgctcttaactggctagaagatacgatcgagtacctaaccgaaaa

SEQ ID NO: 234 - DNA, 377 bp, Arabidopsis thaliana
atcctctagagcggccgccctttttttttttttttttttgataaaacacctagagagacccagctactgttgtagccggagaatatatttctttttaaaattaaaaacagcaagacatcccaaaaacaaactaggcaagtcttaacagactgcatgtcgtttttgctaaacagaggtttcttcgtatctaaaaacggcattacaataaatctgtaaacaccttttcttttccataaaacccctttcatttctcataatttacgactatgtccagctaatcgccacgggacttcccaccacgtgtttcccatccgaccattcaatactcccaaagctgttagatccagacggcttcgacgagtctacagtaaacgtca

SEQ ID NO: 235 - DNA, 377 bp, Arabidopsis thaliana
aaacgtgaaaatatgtatagccttttaaattatggttttcgttagagaggagacatatacacatacaaacgcaaaagaatacatatactatttatgatttaggttacaaataaaaacattacacagcaggaacaagtcaagcaagcttaatagttactcttactcattacgcaacacaatgccaagtctttattccaacatacacaaagatctcttagcataaaacacatttttttcccattttccttggtttgagaccatgctgataatttcttcaacagttacagcttgacccgcagctgcagtttgatccacagctacagttatcacactccttgttgtagttcttctcgcaactgcacgaatcaccacatttg

SEQ ID NO: 236 - DNA, 377 bp, Arabidopsis thaliana
  misc_feature (1)...(377): n = A,T,C or G
tcaaataaaagttaaccaaagatataaaaatggaagtctcaatacatatactgcttcttcaccgatctgtgtcatacctacaaaacttaatagcagtaaaagttttgattgcaaagacctaatgaataaaaaagcaacactggtaatttcaatgcagtttgatcgaagatttcagtcgtcactaagagaattaccagtcaccatcttcatggatncttcatcttcttcttgtgcctctgcttcttcttctgcattggtgttttgactttcagcctctatgggctcacactgcttgttcaatgcattttcagattcttgctcctcttgtttctcatctgaatgaagcggggttcgttcagactcaactttctcatcag

SEQ ID NO: 237 - DNA, 377 bp, Arabidopsis thaliana
  misc_feature (1)...(377): n = A,T,C or G
acttaaacttgttcctctcgggtatgttatttatgtttcaaatctatatctttgcaccttcttgccatctaccattagtggaacttatttatttctttatcagcacaaatgagcacgaagacggtttctacaatgacttcttagtgactcaacatgatatccttagggagttggctatctgtcaaagcgaatttaaggaaaacttagaaagaaaaagactaaatctggagatactagagaatacatttccagactgntgtttgaatactattaatgcctctttattgtctatctctacgggtaattctttggggtcttctttttctgaaaattaaacttaatgattatacaaatctctgctgtttctagaaatatga

SEQ ID NO: 238 - DNA, 376 bp, Arabidopsis thaliana
aatctggaaagttaggttttttttgctatcaatagctccaagtttctaccaacaatcagacgaaaaaagcaacacattgggataatctctcactgttttataagtcttagtgtctcactaacgctcaggttgaaaaactagaaaacattgcaacaaaccaaaagagtagaaaatgaaaaatgcagagttcttgcaacgttttcaagacctcaggtgctcattgcctctccatcttttgattattccttacttagtttcgcaaacatgtttccataaaatttggcttcctttttattgaattccttcattttctccttcaaccttttctgctctagcttcacttccctgttgttgggatcgatttcaagggccttct

SEQ ID NO: 239 - DNA, 376 bp, Arabidopsis thaliana
gatactatcagatcaacactgaaagcaataatgaaaatgtgattaacaaacgatttaaataaaacctcactcactaatcccatgttttcaaactcaacaacacataaccacaaaaataaaaattgaaaagataattaaattaaaaataaacaaagggagtggcagcctgcgtaattacgaaaggttttaagagcagagagacacggagacggctacggcggcgatcgtgaccaatgcggtgaacaacgacggtgtgctcacgccaaccgctgcgttagctgacttactgttcgctgaacctgttggcgagtctgaaggagcactttccggtgactcgtccgtcggaggtgccggtggtgaagctgcggtgggtgaa

SEQ ID NO: 240 - DNA, 376 bp, Arabidopsis thaliana
  misc_feature (1)...(376): n = A,T,C or G
tgttttttgcacccgatgcagaagaattgtacgtaaacacaaataattgggaaaagattcagaagagtgctctcttaggacaagagttggagctggcaaagcaaaagatgaagctgttgcaaatctcagagttgaagtaacaacaagacatagaaatggttatttggggaggccagtttgaggatggagaagagcttgagtttggtcttgaagcaccacaggacctcttccaggtctgctgcatanaanntanctcacttcacctttttgatcctgacttccaattttgtctttaattccttgtggaagctctccttccaagcctgcctcttttactatcgatgtatcccccagtacgtaactcttcatgtctgtg

SEQ ID NO: 241 - DNA, 376 bp, Arabidopsis thaliana
cttttttttttttttttttaagtaagaatgtaagatatatctggtagctagttacagacaaataaaattttgttttctcctaatcaccacgtgaataatgagctctacatttacggtttaatttcgatgtatactacaattttcacaaaaaaagaaagaacagaataatttaataaatttattggtgagtttgtttttggcgatggggtcatgcgtcttctgtggatgtcatggaccatggtgtcatatccatggggtaacttcccagtacccttaggaacgacgtgtactcttgaacctccgcaagcgcgttctgtgcacgcggctcagccatcgatgcctcaaaatcaacgtaaaacatgtactcgaagttctt

SEQ ID NO: 242 - DNA, 376 bp, Arabidopsis thaliana
cttttttttttttttttttttttttttttttttttaaaccaatcttcaacaagaccaatattcgttattctgcattaaaggtgattaacaatggaaatctttgtaaggcgtcgaccatgtatatacatgtagacatatttttaccagttgtttttttggtcttgaagctgatcaacgctagtcttgttcgtcggtagatatcttaacattgttttcaacaatacatgagacagctcaattctcaaatcgtctaaaccagtcaacgatcgtcctggaaagaactcgagtttcgctaagaggaatggtctttagcgcctgagccacagcgtctgctggcgagtacacagacccaatttgccactttgggtcctgtatg

SEQ ID NO: 243 - DNA, 376 bp, Arabidopsis thaliana
tcgagcggccgcccgggcaggtacttccttatggctcccatcttgtttcttgagatgaagatttacggacagtggatgtctggtggacaaagacgcctctccaaagtcgccaaccctacaaaccacctttccattgtcggtaactttgcaggagcacttctaggagcatccatggggttgaaagaaggaccaatattcttctttgccatagggttggcttattatttggttttatttgtgactctctatcagagacttcccacgaatgaaaccttacctaaagagcttcaccctgttttcttcctctttgtggctgcaccagccgtcgcttccatggcctggaccaagatctctgcctctttcgatctcggttcgc

SEQ ID NO: 244 - DNA, 376 bp, Arabidopsis thaliana
gtctttctctggtcttggagagaaggttctcgaacattacacttttgctaaggcaaacttgatcagaacagccgccacaaattatctgctggactctggtattcagtggggggcagcgcctccagtaaaaggcatacgagatgctgctgttgagctgttacacactcttgtagctgtccatgcagaggtatttgcgggtgccaaaccactcctggacaaaattcttggcactttggttgaaggtctgattgatacttttctcagtcttctagacgaaaacagatctgacgacctgagttcaatagatgcaaatggtttctgccaattgatgcttgagctcgagtattttgagacgatactgaagccatatttgacg

SEQ ID NO: 245 - DNA, 376 bp, Arabidopsis thaliana
tcttcacaaaatgcctttgtcacggtccctcctttcgcggaggatctcgaactcttttaggtttcatcagggagagacaacgacggcaccggaatccgaatcgattcctccgccgtcgaatatggccggttcttcgtcatggtcggcgatgctccctgaattattaggcgagatcattcgtcgcgtggaggagactgaggaccgttggcctcaacgtcgtgatgtagttacttgcgcttgcgtttctaagaaatggagagaaatcactcacgatttcgctagatcctctcttaactctggcaaaattactttcccttcttgcctcaaattgccaggtcctagagacttttctaatcagtgcttgataaagaggaac

SEQ ID NO: 246 - DNA, 376 bp, Arabidopsis thaliana
ccacgcgtccgctgtttctctaagaagatagaacaatcccaagaatctcctcttatttgatcaaccatgtcgaatgtcttgctatccccaaacggctacgtatttgcatcgcctaaacctcttggcagattcatcaattcaaagtccggcggacggaaacttttcttctccgtcgttagagcttcttccgatgatgctgattgtaatgccgaagaatgtgctcccgagaaggaggtaggaacagtgagtatggaatggttagctggagagaagaccaaagtggtgggaacatttcctcctcggaagccgcgtggttggactggctatgtagagaaagatactgctggtcagactaatgtttactccattgagcctg

SEQ ID NO: 247 - DNA, 376 bp, Arabidopsis thaliana
tcgagcggccgcccgggcaggtacagagaacaagaacccgaagacacgcctctctaatcattggaagttctcttctaagcatgtcacagtctttcactggatcaagactttgtatgtagtcaacctcttcatcagagaatggtaatgatgcctgaggccaatgaatccactcaaaataaggatcctcaagtgtttctggcaggcagaggccatggtctattggaataagctccacttgaccaaacataccaactccatcgagcttcttcaccaaaagattcccaccatgacggtccgtgttgaagatccttatgtccaaaataccaatgcggtgcacagaagttacagggaagcttgaagtacctcggccgcgacc

SEQ ID NO: 248 - DNA, 376 bp, Arabidopsis thaliana
cttttttttgttttttcgtaatccattttcgcttagcgttctctattgcatcctctttcagtttcagcagatcttggaaggactggttaaactgtgactcgatcaggtttagttctgtcttgagatcttctgggtaatcattgtctgaaatggaaagattgtaaatggttgacatcattgagcaagaatccagatacgagctcatcgactctgcatctcgaccagcttccatggcagcatttccgtcgtttgctgagtagggaaagtaatagtctgctgatatgtctgacttcattgattgtcctgcagcttcttcatctttcgagttcacagtttgctgatttgctgcttcatgatcctcatggcggacgcgtgg

SEQ ID NO: 249 - DNA, 376 bp, Arabidopsis thaliana
ctctagagcggccgcccttttttttttttttttaataaaaatcaaatctcagcaaaattcattcgtagctctttcaaaaacaagttttagtacaaagtaacaaggttatagcttattggacaagaaaaggctagggcttaattcctatcacgtcatatatgaatttctcaattgcggcaaacgaagatccaccattcttcgtagctctctggatcatctgcgagatatccatcactcgtttcctcacaacattattatccgtgtccattacataacgaatagcggtctctatctcgtttgcgtttactatctcatcactatgtaccctgtaatcaagcttcagctccacagctagcttcagttccttcaccatcag

SEQ ID NO: 250 - DNA, 376 bp, Arabidopsis thaliana
gccctttttttttttttttttgtttggagcctgtttactgatagatatattattccatatttttacatgagcaagctctctttagaagcaaaacatgtgactctctagctacattctactcaagactttagcaaaaagctgggaatggtgaaattttgaacaaatcagagcttgagaataaggccaatggggcaatgatcacttccattgatatcagggaggatgtaagaatcatggacattggccgcaattgattgggacaccaagaagtagtccagtctccatcctttgttggttttgcggccaccatggcgataaccccaataagtgtaaccgacaacaccaggatgttgttttctaaaggtatctacaaatc

SEQ ID NO: 251 - DNA, 376 bp, Arabidopsis thaliana
gcggccgcttctcctcctccgcctccgcctccaccgccaccgccaccgccgccgccgacgacttttctcacttactcaacaccagagatcttggtttagtgttataatggaaggtgttggactaagagctgtaggatcacactgttctttatctgagatggatgatcttgatttgactcgagctttggataaaccaagattgaagatcgaaaggaagagatcgtttgatgaaagatcgatgagtgagctatcgactggttacagtagacatgacggtatacacgattcgccgcgaggtagatcggtgcttgatacgcctctttcttctgctagaaactcctttgagcctcatcctatgatggctgaagcttgggag

SEQ ID NO: 252 - DNA, 376 bp, Arabidopsis thaliana
ttttttttattgcagatttgttatacgtttttatttcctttgataaagactgaaataagtattgtcacagtagagataagagacgttgaaacatgaaaccattagtaaagattcactgaacatcatttactttcaagaactgctttctcctgattgtgaatcggtaagcttggtgctgaaatcccaaaccttcttggccaattctgtatctttgacaagtggtaatggtttagcaatgttgctatcttggaagtattcccctgaaactcctgcaacttgaggattcaatgccacatagcaagttgttgccgctccctgtggaacagacttgagtatatatttagccactgcaccaaccgctacagccaaatagggg

SEQ ID NO: 253 - DNA, 376 bp, Arabidopsis thaliana
ctcaaggctcgcgacggaatcgagaggttagagaggttcgaatcatcttctatggattctcccgatctagcctcctccgtgaaacgagatattactgaggtccgatctctctgctctaacatggatactctctggcgctcaattcctgttaaatctcagcgcgatctctggagaagaaagactgaacaagttggagaagaagctgagtatttgaatctaagtctggagaaatacatgtcgaggaatcagaggaagatgttggaagctaaagagagagcggatttgctaggtagagcgagtggagaaggagctcacattttgcagatatttgatgaggaagctcaagctatgagctctgtgaagaactcaaagagaa

SEQ ID NO: 254 - DNA, 376 bp, Arabidopsis thaliana
ccgcccttttttttttttttttttttttctgtcgatcggatgttgtgcacatatattcgtactattgtatagtatataatttatatacaacttatgtacgccattatatcgagtttctattatgccaagaccgactatccgaccattaatacacatatggtataattctatacggcacagctgtcttgtatttcacccaatcgtctccatacttctctgcacatttatgctcatcacgtcgctctcggtggatcagcagtatgctgaagtagataaagtagaagtatgtaagtgggtgtttgatgcctgttggtaagcaccatgacagacccatcaacgcatcacctgcatagttcacatgtcttgacatgcccca

SEQ ID NO: 255 - DNA, 376 bp, Arabidopsis thaliana
atcatactaaaaagaatgcttgattaaatacatcatcttaaagatctttaccaaactcgacttttccaacgttttaatcatacattaaaatcactacaaccagattgcgattgatttagacttgtttcatattcaaaaacgtgtgaaacacaacacaaggaacacgaaactagtaccaacatcaaatttgaataaatcaacggcaaattttacccttagtatgcaaaatgactagaatacccctatatgtatcttttgtttagtgtcacggagaatgagatggaaaaatacggaatccatctactggctttatcacacgtgtatatggtgactcagttaaagcaacggtgcactaaaggcgtcggtgagagagtaa

SEQ ID NO: 256 - DNA, 376 bp, Arabidopsis thaliana
tcaaaaaaatgtctcccattccaaaaccactcttcttcttcttcttcctcaactatgtgtctctctcaacctcactctctcttcacctcccactcacatctctccctatctccaccaccacaaactctcaccgcttcaccacctccctcctctcccggaaaaacccatctccgtcgtctccaccatacaacttccgatcaagattcaaatactcaatggctctaatcatctcactccccataggaacaccaccacaagctcaacaaatggttcttgacactggaagccaactttcttggatccaatgtcatcgtaaaaagcttcctccaaaaccaaaaacatcatttgatccatctctttcttcttctttctcaac

SEQ ID NO: 257 - DNA, 376 bp, Arabidopsis thaliana
  misc_feature (1)...(376): n = A,T,C or G
ccgtacacttggcggttttcacagtataagctgtcttcttcactagggcgaaatcggagactcagatggcgattcacggcgttggatcctgaatcttcctcactcgactctgaatcctccgccgataaattcgcttccgggttttgtataatagaagggcctgaaacagtacaggactttgccaaaatgcaattacaagagattcaagataacattcgaagccgacgaaacaagatcttcttgcacatggaagaggtgcggaggctaagaatacaacaacggattaaaaacacagaacttggtatcattaacgaagaacangnncatgaattacctaatttcccatcttttatcccattcttacctccattgactg

SEQ ID NO: 258 - DNA, 376 bp, Arabidopsis thaliana
  misc_feature (1)...(376): n = A,T,C or G
ccacgcgtccgctctctctctctctgcaatggactctctggtagcgagctacgcttcgtcggacgaagaagaagatcttcaaccacgtcgagaagctttcactgtaaaatcctcagaaccttccgcttcgtctctattctcagctattcctcaacctaaagaactcaaatcctccgaagatggtgatttaggctcatctnnnnctcgaggaaaatcttcttctttcctctcatctctccctcctcccaaatcctcaatttcacggaaaaaaaatcccaatccgtcgtcaattccgaaacgtgtcgtccagatcaggcttccagtaaaccctagaccgagcaatcttgacgacgaagacgacgaagaagaagagaaa

SEQ ID NO: 259 - DNA, 376 bp, Arabidopsis thaliana
ctctctgcttctttagtttcacatctcacacaagtctttgctctctcttaacagtttttcttctatcatctttaaactatgggaactgttgtgtatcaacaagggtttcagtctcagcttaatgagcctagggctttaaggcttaggctatcttcaccaaatcctcacttttctcaaccatttggtttagctctcaaatctcatttacttgactcctctcatgcagaggacacccgaaaccgtaacgatgacaaagctgctgcttccccggtctctgactcgagtggctggagctctctccagtccctatcctctggctcctcctcctccacaaagacgacgacaagctctgagaaagagagtagttactatgttc

SEQ ID NO: 260 - DNA, 375 bp, Arabidopsis thaliana
  misc_feature (1)...(375): n = A,T,C or G
acatcaacttagattgtctttattgctgactctgactcaaatgaacagacaacatagatagttctaaaagtaacatgacatagagactactaagcttaccaacagtttgtgcctttatccaggtatagtccaacaggcaccaagacttgggtaagcaaggtcttgtttannacatttgccttttatttctgagcagctttgacatagctctctggcaaatagatttctccacctacttcaccgtgctgttctccgctaatggttttctttgcgatgttgaattcttcactcatagcatccattccttgtctgattgcttcttcagcactgccataaccattctcctctgcatactttcggatgtcttctgttatc

SEQ ID NO: 261 - DNA, 375 bp, Arabidopsis thaliana
  misc_feature (1)...(375): n = A,T,C or G
gcgaaacaaaatattttggcacttagtttcaggaaaagattcacagtgatgaataaaactttttacaaacattgagtgatacaaagctttacaaaaagagggagaagaacacaactttcttaaccactcatagtaacctcatcttttcttcacactctnnttctcatacgaatccaattagtaattcacgagcagcaacatctacgttaccagtcatcatcgagactagcccggtgaaaacacatgacagtgcaaatgaatatgaagaatgatgtgaactctatgagcattgcacctgtctcgatcatctgtgcgtgccttaagatgattgggatagcaaggcttcccacggtcgatgctccggtcaagaacttc

SEQ ID NO: 262 - DNA, 375 bp, Arabidopsis thaliana
tcgagcggccgcccgggcaggtgatgaagctcaaagtgtatgcagatcgaatgtcacagccatcacgtgcttttatcatattctgcaaggttaatggaatccaattcgatgaggtcttgatttccttggcgaagcgtcaacaattatctcctgaattcaaagatattaacccattggggaaagttccagctattgttgatggcaggcttaagctctttgagagtcacgcaatcctgatatatctatcctcggcgtttcaagtgttgctgatcattggtatccgaatgatctatccaaaagagccaagattcactcagttttggattggcatcacaccaatttacgtcgtggtgcagctggatatgttctgaatag

SEQ ID NO: 263 - DNA, 375 bp, Arabidopsis thaliana
tcgagcggccgcccgggcaggtctcaatctccacacagctgcctctgccgccgctacaagctccgattctccttcttccgccgccgctaaccagtggctctcacgatcctcatccttcctccaacgaggcaacaccgcaaacaacaacaacaacgaaacatccggtgacgtcatcgaagacgttcccggcggagaggagtcaatgatcggagagaagaaggaggcggagaggtggcagaatgcgagacacaaggcggagatactgtctcatccactatacgagcaacttttgtcggcacacgtggcgtgcctgaggatcgcaacgccggtggatcagcttccgaggatagacgcacagcttgctcagtctcaaaa

SEQ ID NO: 264 - DNA, 375 bp, Arabidopsis thaliana
cccgggcaggttgctcacaatgtcgctgtcagagctaccaatgaaggagtcaaagtgttggggaacattcttcttcatccaatgtttggtggacaggagaggactcagtctgagaagacccttgatggcaaatactttgtgactatacaagatcgagattggtattggagggcttatctaccggaaggtgaagatagagatcatccagcatgtattccctttggcccgagaggtcaaagccttaaaggagtcaactttccaaagagtcttgttgttgtcgctggtttagatcttgttcaagattggcaattagcctatgtggatgggcttaagaagactggtcttgaagtcaatcttttgtatttgaaacaagct

SEQ ID NO: 265 - DNA, 375 bp, Arabidopsis thaliana
cttaacttgcttaatctcgccgtccctccggtcacccaccgctctaacttccttccaccttcaccttcggcgtcgccacttccgcttaccagattgaaggaggttggaatgaaggtaaaaagggaccaagtatatgggataagttcactcatatcgaagggaagattcttgatggaagtaacggcgatgttgctgtggatcattaccatagatacaaggaagatgttgatcttataggacaattaggtttcaatgcttacagattttctatatcctggtctcgcattttccctgatggcctgggaactgaagtcaatgaagaaggcattgctttctacaacgatcttattaatacacttcttgaaaaaggtattc

SEQ ID NO: 266 - DNA, 375 bp, Arabidopsis thaliana
tatacacaaattcacacataaaatttagaaaatatgggaggcacaaaattgacccatgtgaccaccactaaccctaataactccaacattcatggaccagtcgtagacgaagtagaaggccttattaaagtttacaaagatggccacgtggaacgatcccagctcttgccatgtgttgatccctcactacccctcgagctcggcgtgacttgctccgatgttgttatagacaagttgaccaacgtatgggcacgtctctatgtcccgatgaccacgaccaagtcgtcggtctctaagctccctttgattgtttacttccacggtggaggattctgcgtcggctcggcttcttggttgtgttaccacgagttcttg

SEQ ID NO: 267 - DNA, 375 bp, Arabidopsis thaliana
  misc_feature (1)...(375): n = A,T,C or G
cactatgcccaatgacgatatcactcatccaactccggatcttactggttacattactgaaggtcagatatatatcgataggcaacttcacaacagacagatatatccacccatcaacgtgcttccatccctttctcgtttaatgaagagtgctatcggcgagggcatgactcgtaaagaccattctgatgtgtcgaaccagctgtatgcaaattatgcaatcgggaaagatgttcaagcgatgaaagctgttgttggagaagaagcactttcttcagaggatttgctttatctagagtttttggataagtttgagnnnaagtttgtgatgcaaggagcttatgatgcacgcaacatcttccagtcgctggactt

SEQ ID NO: 268 - DNA, 375 bp, Arabidopsis thaliana
  misc_feature (1)...(375): n = A,T,C or G
gtacaccaatgaaagaatcctctttctcaactggaggaactgcaatcgttagttgaacacctaggaactcaacttgaccacaacaacacatccaaacagtcagtagacccgaaccatggctgttatgaaggnacagaacaagaactagaatagtggtaactatgcttttcttctggcctttaggaagaaacagatactccgagacattctatgtcgaacgattcgtcctcagattcttaaacgttgtcgttagcgagatcaagtcggtgactatcctgtgagtcttcctgttagnnngtatcgtcgacgttagtctagtccggttgttttccgtgcggctcttttaaacatcttccaaatccatcagcactatca

SEQ ID NO: 269 - DNA, 375 bp, Arabidopsis thaliana
gctgcaaggaagtttatgagaaggtcttcctctgtaaaattaactttcccaaatggaatgtgaacaatcccagttttgtctgctctgaattcaactttccccttcttgaactcttcaatagcctggggaatgttcgctgtgactgtaccagccttgggatttggcatgagcccccgtggtccaagaatctttcccaggccagcaaccttgaccatcatatccggggatgcaatcagcttgtcaaactccatgaagcctcctttaatctgttcgattaaatcatcactgcccacaatatctgcccctgcacttttggcttcatcaaccttctcaccttgtgcaagaacagcgactataacagtctggccagttccc

SEQ ID NO: 270 - DNA, 375 bp, Arabidopsis thaliana
cgcggccgaggtacttgtgctagagttgcgattggacaggttcttttgtctgttaggtgtaaggataatcatggagttcatgctcaggaagctcttcgtagagctaagtttaagttccctggtcgtcaaaagatcattgttagcaggaaatggggattcactaaattcaaccgtgctgagtacccaacttcacatgtctcagggatgaatacagtcaatttaccagtctcttcgttgaattcatagtttgtagcatcttgtggaaagatcccaactggtagaccaaattccttcaacaattcaggtaatggcttctgcatttttcctttgagtttgttgactaaccacttggtacctgcccgggcggccgctcga

SEQ ID NO: 271 - DNA, 375 bp, Arabidopsis thaliana
ttttttttttttatctccagaaacatattactatcattagaaaaactcaaaaaataacataagtgtttttaacccgaaagaagaagagaagaaaagaatgactaaaaaacgatatgaataaacaattaacaatgtgtggaataaagagcaatggaatgggaacaacagaacattagaagtaattacctcaaatcatctaacaaagatttgattttattcatgaaggttgcaacgacgaagatatgggtgatcaaacttgatgtacttggtccaatacggccgatatttggacattgccaactccaaccatggtttcatgttcccgttatagtgaaccactgctgcattctcaatgtccttcttgtcgatactcgg

SEQ ID NO: 272 - DNA, 375 bp, Arabidopsis thaliana
ttttttttttttttttggtaatttatctttgagatttatgatatcaccaaacaaaaaggtaagtttacttgaacgttaaaccaaggcaaaagacgagttagaatgagatttgtgaatggaatacgtgaaagaagaaacaaatagcatatcacacaaggttcaaacttcccactcagtaatggaatataagtctactattcttcggcttcaggttttactgtccctcgattaaagcaagccaagaactctatgtttccgtctgcgccctttatgggagattcgataaagcctttgttggtaaatccatagcgctcaacaccgtttattatcttctcaagaacctcttgatgtacttcgggatctctcactatgcca

SEQ ID NO: 273 - DNA, 375 bp, Arabidopsis thaliana
ctttttttttttttttgaacttggagattttgcattaatggagaaatgatagagatgtaatatactattcatctagaaagccagattcagaggcaaaagactctaactctttagatttctcatcagtgaaaccaagagttgccagtatcttgtgacctggagattcaacttcagaccaaatccccagtagtatatgtgctggcattacttccccgataccacctgcttttagattctgatccagagcagagtcaagtgctctttgtgcatcttgagttaaaggaggatgttccgggctaaagaaatacatatctgcctttcctagtaacttgaccgtttcttcacgcactttgtaaagcattatcttattagccc

SEQ ID NO: 274 - DNA, 375 bp, Arabidopsis thaliana
ttttttttttttttttctaagaatttgtcttgatgatgatagattatttagagatagaatcgatgagaaagacactgaaatcccaaagtttatcggcgagagaattgttggtagcaaatttgctcggagcaacgatgttacagtcgccgaaatactttccggtgacgccttcgagatctggatgaagtgcaacgtagcatgttgttgctgctccctgaggtatatttttccaaaagaggaaagtcatagccctgaagaccttcatgctaaaaccggagtagcgaaagagattagtggtgacaagaccagggtgcaccgaatttatagtgatgttcacaccttcttcctgtagtctacgagagagtgcattggagt

SEQ ID NO: 275 - DNA, 375 bp, Arabidopsis thaliana
  misc_feature (1)...(375): n = A,T,C or G
tttttttttttttttttttttcctccaaaactttttggaattgattgcaaaaataagaataccaaaagcttacacacttaagtgtgaaaagggaaaacataaannnnacaatgacacaacagattcttcgtgaaacttacatgacgagagatatacaaaacgaaaatttcttctatcaaagaaaaggaagagactttactatgaatcagcatcgagatcgtgattcgaagaagtaggcgagggaagctgatcgatttctcgtcgagaagcttcccacaactgttgctctattcccagttttcgtagctctatcaaccctctttccacatccaaggcatcatgagaagtcgtctgagatttcccactgctacggct

SEQ ID NO: 276 - DNA, 375 bp, Arabidopsis thaliana
ttttttttttcattgaaattagtgtattgcttaaccttttccttttctgtctttctgaactattaatcaccagggtgtcccaatgatttacatgggagatgaatatggccatactaaagggggaaacaacaacacgtattgccatgacaactatgtaaaccccttatgctttgcttccagggtgattataagtaattttttcgatcttagctttccgacattaacacaactctgatgcagatgaactattttcggtgggataaaaaggaagaagcacattctgacttcttcagattctgccgtattcttatcaagtttcgtgagtatgtaatcttctttcatgagtctatcgatcttaattgcttagttgatcgc

SEQ ID NO: 277 - DNA, 375 bp, Arabidopsis thaliana
tttttttttttagcgattgctgaacgacattgatgagaattttaatataagcataaacatcattttacgttgcagaaccaatggttcactaccaaaagcccctgaataagccaaaagcttgttcagcaactacaatacctctggtcaagctatcttgaattcgtgaacttataacaccattttctcaggtgaagatgtcatcatctactctagtaaaaaggagactagacttacctaacgaagattcaaaacaaaaccaacccaaatgagttagcttttcaagttggtacaagggacatgatttgagtcttgatccgtcccatgcacgtttggatttctctgtagatcggtaggttctgtgggcatcgtggctgc

SEQ ID NO: 278 - DNA, 375 bp, Arabidopsis thaliana
tttttttttttattagaaataaaataaatgagtaaaaaagaatatgaatagctcaaatttttatatatattccgtcagaaaagagcaaaatatgacaagagatttatcttgagccgtctttttaagtttgacagtgttgagtctgtcttcttggggctcaagtcattgctctggttgagaaataaatgaattagctgttttctttttttcagagagagagaggtaaaaatgtgaagattgtacaaattgggaaatgagagagagatcaagaagaaataggttctttggtgttgcttgttgtgatttcaggagcagtcgttgttgcttcgccttctgcagctggtacttgttgtggtactgcttcagattcggtgg

SEQ ID NO: 279 - DNA, 375 bp, Arabidopsis thaliana
ctgcatcattcctcaaaatcaaagcattccctctctcccctcgcttcttccccatccgtacactccgttgctctgtctcctcctcctcctctgagcccattgaattcgacatctccttcgctcctcccaaacccaaaccctcctccactcacggcggcgtcacccctcaacaactcttcatcccttggatcgtccgtagtgatgacggcactctcaaactccaatctcaacctcctgctcgtttaatccacaacctcgccatcgatgccactactcaaaaccctaagaagaaagataaatctaagaagaaacaacctcaagctacctcctcttcctccgccaccaccaccgcctcatctccagcttcacactcag

SEQ ID NO: 280 - DNA, 375 bp, Arabidopsis thaliana
aaacgaaaatgaaactgacagggacaagcccccttaatagatggaaatataaatcatattaggcgaaacagactattctttaagcgtacgagatatgaattaattatccactactagactataaaaagtccagaagtccttattatgaagatgaagaattaagcgaagagctgatcttcctcggacgccgcaactcgtaagcgcgtgattacttctaagtcgcccattagtgaagacgagctctcgccggctcggcgggactttccttccgcttcgaactccagttccgataccactgacggcgctcgagtccctaattcttagagcaacggctcccttggcaagggctcctataaagactcgtacattattatg

SEQ ID NO: 281 - DNA, 374 bp, Arabidopsis thaliana
tttttttacaaaacaaagctaattatataaagtagtaatgtttcaacatacacaagattacagatacactagttcacttttaaaccagactaatctcaacaatatcttctactaaaaatgctcaaacagatgaagagacttgtatcgtcaagaaactcaccaactccctggcccatcgttcccagctgctggcctccggttcaagtaacgtataactgcatcttcgacccaaggttggttgaagaagtctgatcgacgttctctctcagcatttcgactggcttctcccgcaacgacctttagatccttgctctgagattcgatcagggcgtttatgaattcaactggcgattggctgaaccccaagaaaaatg

SEQ ID NO: 282 - DNA, 374 bp, Arabidopsis thaliana
tcgagcggccgcccgggcaggtaccctttcggagagattatgaacttcagctgctcgactccttcggtttgatcctgatcgttggttcgacttgttaccgattgcatctgatagagatacagattcgtcagtgtgatttatacgttttctcttacggtcggttgtgatgcatcttccactagccatttctttgatatctttgccaaagctgcaaccagaggagccacctgatgaggaacttgcgttcggattaagcttttcttctatgtttttgcttcgatcatgactcattgagacatcgagatcgttctgtgatgggttgcttccgcaatggctaggtccaacggtcgttaccgagtacctcggccgcgacc

SEQ ID NO: 283 - DNA, 374 bp, Arabidopsis thaliana
ggctttctcgagtttctgagattttgagctaaacactctgcttaaacctcaagttcttacctttttactcttagtagagttgcaaagtttaatcctttgataaaatctcccgagattccgagtttgtctcccatgaggatttgaataccgaagaaaaaatgtcagtggaaagatctttggaagcttgggaagaagttcagagacatggacaagacttagctgaccgacttgctcagggctttaacggtttgattcaaatcaacccaccttcatttccatcgaagctatttgatcttgagttctctagtcagcatttcgggattagggattctaggttttctatccaccaacccatcaatggcgtttcggctatt

SEQ ID NO: 284 - DNA, 374 bp, Arabidopsis thaliana
gcggccgcagtagatacatcaaaataagccatggatcatcaaaccacaacgcacattagaaaggattaacaaaccatacatttaaaaagaagaagcagaatctcagtttccagattcttgaaatctcttttgcaaaggcatagaaccttgttggcctgcctcacctcctcccgaacccgtaattcccattttattcccaatggtggagccaagtgactgtgtagagtcttgaacagattctgtagacttttgcgtcacttcttccgtcgtaccagcgatccaagaagtaacagctcctctcagcttctccgcaatccctccttcgcctttctccgcatatgcttcaccctgtttcgtagctgcttccgagctcg

SEQ ID NO: 285 - DNA, 374 bp, Arabidopsis thaliana
ggtacagaagatgtacacaaggggtcttatgcgtcctacttacaagcatgcagatccgaagctcttcttctgtcctcattttctatactttcacctattctttttttattcttctgtgcatagtaaatcagttttccctctgcaaatcatagaaagggcatgagcacaacatgtcatttcttactgtttgccttcttcttcttaattatatttctgcatcttggtttctggagaacgtttcggataaagaataagtgccaacgccaaagagaccataagaccaacaactccactaaaaggctgtgatgggcggctccctgcaatccaaaccggggaacttgggttgtaagtgaggaatccacctgactgtagta

SEQ ID NO: 286 - DNA, 374 bp, Arabidopsis thaliana
ccacgcgtccgggaagccgtgatggaggagaagtcggtggagttgagggaaaacgcaaagaaatggaagcgtttagcgatggaagcgggtagagaaggaggatcttcggataagaacatggaggcttttgtggaggatatttgtggagaaactcttgttcaaaacttgtgtgaagcagaggaggttaaagtaaagtaaataaaggacaaaagagttggtgtctagaagtggcggagtgttatttgctaatactgtcactttgtaatatcaaattcaattaaacataaaatttactccatctagataaatatgttttttgaataatggtcaattacaaaacatgtttgattgaaaaaaaaaaaaaaaaaaaaaaa

SEQ ID NO: 287 - DNA, 374 bp, Arabidopsis thaliana
tcgagcggccgcccgggcaggtgagatgcttcttcaggcggcggtgcagaaccgcaatgttccactggcttcttccgcctcctactctcgtctccttcgctgcagatctcctgtcgtctccgtagctgctctctcgaagaagacggcagcaatcgtgtgctccatctcccaggtttatggctacggcacggtggactacgagagaaggccgattgtccagtggaatgccatctacaagaagatttcgctgatggagaagccagagcttggcgctgcttccgtcttgaatcagtgggagaaagccggccgcaagcttaccaagtgggagctctgtcgggtcgtcaaggagcttcgcaagtacctcggccgcgacc

SEQ ID NO: 288 - DNA, 374 bp, Arabidopsis thaliana
ccacgcgtccgtgcgagctttctgcgaactctctaacggtacttgagaatgcacaaagtggatacatcagttatcttgcagcagttggagacttgagaaaaggggtgtaccaagaagaactcattggttgttttgtgttccattaggaaccaaaaactatatacattatttcgatcttacttcacttttgacaatttccagttttagaatatctggatttctcttcatatttcttgttgtttagcccaatggctttaaatacttgagggtagattcagcaaattcttgaagaaccattgtttcatcgttgtatttataatgttatgaactcccttcgggtttcctgaaaggaatttaaagaaaaaaaaaaaaaa

SEQ ID NO: 289 - DNA, 374 bp, Arabidopsis thaliana
ttttttgacgaatgaaactggaagtttatatattttgttaatcatcccataattcaactaaacgtagcatacaattttaaatcttttttttataaaatgcataaccataaatataataatgtctctaatgaaaaaactcaaattacatataaaaatcaatttttcaagcaagctcttaaaggtttaccacaaagacagtcgttaaacataaacgacgccgcttcaagatgatcaaacggtgaacctaccggaatcctcccacggagatggttatggctaagatccaaatgaccaataaacgacgcacctgagatcgatctcggtattggtcctttcagattattatacgacaaatcaagaactgtgaagtaaga

SEQ ID NO: 290 - DNA, 374 bp, Arabidopsis thaliana
  misc_feature (1)...(374): n = A,T,C or G
tctagagcggccgccctttttttttttttttataaattttttgcttttattcgttaaaaaatagataatatctcagccaattcttgaattaatctctgtaaataattttgtacatatactctattcttttgtcacaaatggaaagtgaacattaaagggggaaatagagaactatatattaaaaaanngttaccggctcgacttgaagatcatcagagccgagccgaatagagctgatgggggcaaaacttctgagtatagctaaaacggagcttagagcataagctcagtcttacacgtgctctccttctgacacgtgccaaacacgccgatccttctcttcttaacaggtaccacatgatacgcacgtgaca

SEQ ID NO: 291 - DNA, 374 bp, Arabidopsis thaliana
ttctgagcgtttcccttaactcgcaaatctgtactacataacctacacaatttttcctaaactaagaacataaagagagaagtttggtcagatctttggccggatcatacatggtgtgatcatgttggctccaaaagtcggtccaatagcagcagaagaaaacatcagctggaattaacaatgtttctgcctcttcccattcagagtaaaaccttttttaagttagtgggactgtgcttcgagaaggatgtttgtggcggcgttgacatcattcctggcgtgcacaagcgcctgtctcgctgcgtttctgtcgaatcccattgataccaatgtagttatggcttcctcagatggctccacacttgagggcaacg

SEQ ID NO: 292 - DNA, 255 bp, Arabidopsis thaliana
tggatattaagttaatcggaggtaaatccctcccggacccgaccgagttacgcaggtgttctcatcttcaaggccccaaagttctccagataagttatgttagggatgttacaagaagtagcgcagaggaatttgtgggaagttccactggtaaacgagtgctaaaattcgctctgactgacgggaagaccgaaatatccgcgcttgagtactctcatataccaacgattaacaatgatgtcactcctggtacta

SEQ ID NO: 293 - DNA, 374 bp, Arabidopsis thaliana
  misc_feature (1)...(374): n = A,T,C or G
caacaacagcaacatcaacaagctatgattcaacaagctatgatgcaacaacatccttctctttatcatcctggtgttatggctcctccnnnnntggagcctttaccaagtggaaaccttcctcctggttttgatccaactacttgccgtagtgtgtatgctggaaacattcatacgcaggtcacagagattcttcttcaagagatttttgcaagtactggtcctattgaaagctgtaaactcatcagaaaggataagtcatcatatggatttgttcactactttgatcgaagatgtgctagtatggctataatgactcttaacggaaggcatatatttggacagcctatgaaagttaattgggcgtatgcaac

SEQ ID NO: 294 - DNA, 373 bp, Arabidopsis thaliana
  misc_feature (1)...(373): n = A,T,C or G
tttttttttttcttttctcgtctgtaagaagataatagacaaagaaacttgccgtgttttataatctcagttttgtgtgtttggtgagagagcaagaccggtacacaacaaacacacaagctactacacagagagagaagtgagagatagagagaaaccaacgtcgtagatgatgattgatttctcttaccggtgacgggaatatataatcactgcggtgaagcttcaggttggtggtgtggattagatataagctctggtggtacagcaaagtgcaaacctcctctgcgttgtccncccccgcccccaccgctatgtaacataaacgctacttctgccgcagctagagcagcagcttcctgtctttgtcttc

SEQ ID NO: 295 - DNA, 373 bp, Arabidopsis thaliana
ttcaaaagaagacataaaacatttcttttgaacctgaaaaataaaattccccaaatgaatgtaataatctgatgatgctttctgcaccaatccaagttttcttaagaatctaaaagaaagccaccaatgctttctcttgattcttttacctaaaatgcaatttgaaacaacaacaaaaaaaaagaaagaatgtgatgatggtttcttcttcttcttcctcctcctaagtactaattaagattctagaatcctaaaaacgatggatgaatgaatgtttctagaacgttgttggagagatttgatgatgagttagtgtacaatgaagtttgtcccttcttctggctattgtagtagttctgaatcaaccctctat

SEQ ID NO: 296 - DNA, 373 bp, Arabidopsis thaliana
  misc_feature (1)...(373): n = A,T,C or G
tcgagcggccgcccgggcaggtcttgttcaccaaagagaagaagactaactgtgttttttttttctttcctcgatgcctagatcaagcagatgggtcaatcagcgagctacctctaagattaaaaaatttatactctttttgggtgtagcctttgtcttctacctctacagatacccttcttcgccatcgacggtggaacaatcatccacttccatctacaacatttccgttaaggatattgaagggaaagatgtgagtttgagcaagtttaccgggaaagtgcttcttatagtcaatgtagcctctaantgtggtctaacacatggaaactacaaagaaatgaacattctgtatgccaagtacctcggccgc

SEQ ID NO: 297 - DNA, 373 bp, Arabidopsis thaliana
tcgagcggccgcccgggcaggtgttgctaagaaaaacagtaactggagttgttaatgaatggcaggtgatggtttgtgggattcttctggtagtgatggcagttgggaacttcataaatacagtagacacactgatggcaaagtcaagagttaaggcaaagatgaagagaagtaaaagcagagcagagcttaattagacttcacaggtctctcatctgttcaaaatcttgctttttttgcagttcataaatttttgccctttttgtttttaggccacggataaaataaaactgtgaccatcctttttctgtgtaaatggaagtggcagttgatatttgataattgatgttgtatttgtacctcggccgcgacc

SEQ ID NO: 298 - DNA, 373 bp, Arabidopsis thaliana
ttttttttttttttttttttttttttttttttttttttttttttttttgacagtgaatgtattattattaccacaaatttgaagttatcacgtcttacaacatacttgtgtcttttttagatgtaacatggttgatatgagtttatgtaggtgtccaaatcaacaacactccttcagcttagctccttcgattggcctagttgtagtaaagctcaagacccatgccgtcatggatctcatagtccttgagagtgatgtgatccttgtagatgttgtaccacttctgaattctgatcttctcggctcgtgttccggtttgtgccgcgacaagcttcttcagatcaccgatcgtgtcatcatcgttacacttcac

SEQ ID NO: 299 - DNA, 373 bp, Arabidopsis thaliana
  misc_feature (1)...(373): n = A,T,C or G
cgagcggccgcccgggcaggtcaatgccgtattgcatcttcttatagcatccttggcgggatataatcccttctaccaatatgatcatctcatgaatgaannnccattggattttctggaatcttgttttctatgattgtcatagagacaagtctcagtggagttacctctagaagtgtgtttggtctcttcaacgttcccgctaaactgtatccgtggatcttactaatagtattccagcttctcatgacaaatgtttcactgcttgggcatctatgcggcatcctgtctggattttcatattcttatggcctcttcaatttcttgatgcctggctcttcattttttaccaccattgagtcagcctcctgga

SEQ ID NO: 300 - DNA, 373 bp, Arabidopsis thaliana
  misc_feature (1)...(373): n = A,T,C or G
atagcaagtacactgcatttcaacactctcatatctctccttcctacttcctcggtttcatcgtccactgtctcaacaatggcgtcattgtcggtaccttgcgtcaagatctgtgctctgaacaggcgggtcggatctctccctggaatctctactcaaagatggcagccgcaacccaatgggatctcctttccctccgatgtttctcagaatcattctgcattctggaggttgcgtgcaacaactaatgannttgtttctaactncactccnatgactaatggtgggtatatgaacggaaaagcgaaaaccaatgttcctgaacccgccgagctctctgaatttatggctaaagtctctggtcttcttaagc

SEQ ID NO: 301 - DNA, 373 bp, Arabidopsis thaliana
ccccgagacaaaaccctagatctgagccgccgccgcctcttcgccgcccgtggcttctgccggcggtgtgagagggcttcccccctttctccttttcgttgtcttgtctattagtgtagaaataaggtcgactcgttgctcctttctccggcggctaaggtgaagctaaacgacgacggtgtgacgatgcggaggcagtagctggaggagagagatctccgctcgatctttatccgggagactggtggggttcggagctgctccgagcagctgtttcgatccctgtatcccccaggagaaccaagccgacggaagaacagaggcagagtcgcagtcagagtctttcaggcgtggggatggagttgtggtcgcc

SEQ ID NO: 302 - DNA, 373 bp, Arabidopsis thaliana
tttttttttttgggaaatatgaacttggctaacttatataaaaagaaccaatagaaatcaacataaggtttaattataatgtgattaactaagccttgaagtgatcaatctggatattctcaacctcgagtttcttgaaatcacttctgtttcttgaaacaaagaactttccccaattgtactttttataacaaggcgggttttcctcacttataagctcctccaatggctcaatattggcttcatgtgatgggaagaagaagaatggtattgagaatctctctttgcttgtattcacgaccactctatgttcagcactccaatactcatcatttgtccacacctgaatacaattgcccatgttaatgatcaa

SEQ ID NO: 303 - DNA, 373 bp, Arabidopsis thaliana
tttgaactcctagaaaaccctagcctttgcaattgggtgctacatcttccaaatcgttccgggatcgaaatctctcgaattggggacgttgtacattgcacacgatgggcgatttcaacctcgctctcgtgattgtcgcgatcgttgtttgcgtcatcgtattcatctctagcatctatcttctcgtcaactatcagcatccagatgatgcaaaccaggcttatttccccaaattcgtcgttgtttttggcctttctattgctatgatctcgattctcatgttaccggctgatgtggccaatcggcatgcttgtcgacatgctatatacaatggagcttgcaatctcaccttgcccatgaaggatctttggct

SEQ ID NO: 304 - DNA, 373 bp, Arabidopsis thaliana
ccacgcgtccgcttgctatcaccggtggctccggcgtgtttgaaggagcttatggacaggtcaagcttcgtcagcttgtgtatcctacgaagctgttttacactttctacttgaaaggtgttgctgctgatttacctgtggagcttaccggaaaacatgttgagccgtcgaaggaagtgaaaccggcggctgaagctcaggcgactcagcccggcgctacgatcgctaactttactaattgaaatctaaatctttgtgggtgtctttgtcatggatcttattgggctgttgttcattgtgtttacattttaataatgggcctaaataatgagcctttgtattgggccgttctcgtaaaaaaaaaaaaaaaaag

SEQ ID NO: 305 - DNA, 373 bp, Arabidopsis thaliana
tcgagcggccgcccgggcaggctctctacagagaatttgattattttttttctgatctgagaaaaagaatggcgaacggagctaatagagtggatctcgacgggaaaccgataaaaccgttgacaatatgcatgatcggcgccggaggtttcatcggttcacatctctgtgaaaagctcttgaccgagacgccacataaggtgcttgcgcttgatgtatacaacgataagatcaaacacttgcttgagcctgataccgttgaatggagtggtcggatccagtttcatcgtatcaatattaagcatgattcaagacttgaaggtcttgttaagatggcggatctgattataaaccttgctgcgatctgtactcc

SEQ ID NO: 306 - DNA, 373 bp, Arabidopsis thaliana
  misc_feature (1)...(373): n = A,T,C or G
gaaaacaaccttgaaatggagggtaccctggagatcggcatggagtatagaactgtttctggtgntgcgggacctctcgtcatccttgaaaaagtcaaggggcctaaataccaagaaattgtcaatatccgtcttggggatggaactacccgacgtggtcaagttctcgaagttgatggagagaaagctgttgttcaggtatttgagggaacatctggaatcgacaacaagtacacaactgtgcaatttacaggagaggttttgaaaactcctgtttctttggatatgcttggtcgcatcttcaatggttcagggaagcccattgacaacggtccacctatattgcctgaggcgtacctgcccgggcggccgc

SEQ ID NO: 307 - DNA, 373 bp, Arabidopsis thaliana
ttccacacgagatttctgttctcgttgagctcatcttaggacacctgcgttatcttttaacagatgtgccgccccagccaaactccccacctgacaatgtcctccgcccggatcgacccgccgaagcgagccttgggaccaaaaacaggggttgtaccccgcctccgattcacggagtaagtaaaataacgttaaaagtagtggtatttcacttgcgccgaagctcccacttatcctacacctctcaagtcatttcacaaagtcggactagagtcaagctcaacagggtcttctttccccgctgattctgccaagcccgttcccttggctgtggtttcgctggatagtagacagggacagtgggaatctcgtt

SEQ ID NO: 308 - DNA, 373 bp, Arabidopsis thaliana
cctttttttttttttttttttttttttttagttttaagggaacaggccccgactattgtcgaggtaaagtctttattaaacacatacttttgctacagaaggtacggacgcaacacattaccaacatatacggacgtaacacattaccaacataacaaaaagcccctaaactcaaacaacatcatcatatcatatttaatggtctaagacgttaagaccggtcttgtccactccacgcttacgcatttaccacagctcctccattagggtgaagaacttgaccagtgaagtaagaagagcagtggttacacgccaagaaaacataggatggtgccacttcaattggctgacccgctcttttccggacgcgtgg

SEQ ID NO: 309 - DNA, 373 bp, Arabidopsis thaliana
  misc_feature (1)...(373): n = A,T,C or G
gagctcggtacctcgagcggccgcccgggcaggtgagtagagagagtattgctaagaagaatcgttctggatatgatccacttcatattgctgccatannntcatcatgctattgttgaggtcttgctagatcatgatgcgacgcttagccagacatttggcccatcgaatgcaactccgcttgtgtctgcagctatgagaggccatacagaagttgtgaaccagctcttatccaaagctgggaatttgctagaaatttctcggtctaacaataaaaatgccttgcatctagctgcaaggcaaggacatgtggaggtcataaaagctcttctctccaaggatcctcagctagcgagacggattgacaagaaag

SEQ ID NO: 310 - DNA, 373 bp, Arabidopsis thaliana
tagagcggccgccctttttttttttttttttttttaagaaaaaaaaatattgatttcattttgttgattttctacaaatacataaatcatttccagaaaaggaaaacagcatcaatttaagcctagaaaaccctaaaaactctgtagaaagaaaatgagaaaatttaaaagaaaacaaaaataccagcagagtcataagagcaacagatgacgccatggcatttttcttacctcttcctaaaataaaattaggataacaaacataacaaacaaatctaaactaacataagagagattctattggaaagaacccaaacaagtctcttacgttatctgttatcatgactctttgttgttgttgttgttgtcgttg

SEQ ID NO: 311 - DNA, 373 bp, Arabidopsis thaliana
tttttttttttttttttgtctgtctgatcaacaatttattagacgacataaaaaggaagaaaaggttacaacttttctttctcaagttacaagagaacaaaacccctcacaatctttaacagagaaatgaatgcctttaagccgaaaactttcccagtgagcactggccaatggattttacgcccaagaaaactttattggagaagcaggaaatcaagttctttgtttttacttttcaaatccaaacaaatcaagattcgcaaggcggcacaggttaaacgcctcaagctgcttttggtacattctcagggagcgtgagatcatcgagtactgaatcatattctgtatcgcgagcgttcttcttgtttagaag

SEQ ID NO: 312 - DNA, 373 bp, Arabidopsis thaliana
ttttttttattcaaatcaattgtattaagttttccctatacaacacaatatttctcaaatcgaagtgacacaataatttcacgtatagactttattcccaacaaataattcacgatcaaccatacattggataaaagagaatagacgtctaaatttaacaacctactctcagtatagtgatgtgtaatatctttccccatgtgtttaagcaaagcttctttaatgctattccaagatggagcaaggccagtgacgtttccacattgcaatctcttctttacaatttagctttcggattcctccatagaacccgtcttcttcgttaccttcctctttatgatctctcatgatcatcgttcttctccaccttgat

SEQ ID NO: 313 - DNA, 373 bp, Arabidopsis thaliana
cgccctttttttttttttttttagtgaaataaaaatatattcatcacaaagttcggttcaataatcaaagaaacaataaaaacataaaataaatctcgatctaaaattctcaatatcctgaagggaaccctccttttcgaggatcactaactgccacaagctcacttcttccaccggagttctcaccggattcttgaactatgaactgagcaatcgtccctccggcaataggagataggacatgacctttcttctccaacacaactcttgttgctttaggaatctcgaaatgatcattgaatactgttgtccagttctcgtacgaagctctgtttggtatcagctgatggtagattcttggagctaagacgga

SEQ ID NO: 314 - DNA, 373 bp, Arabidopsis thaliana
  misc_feature (1)...(373): n = A,T,C or G
gcggccgcatgaattcctgtacttttgaatattgaactcaatttctttgattttggtgtttggtctagttcttgataagaatcttgttatgaaactttttttgtattttgttatgtgttgacagtaatagaaggtactctgaggggatatcttgtctcagagatggaaagtctttgaaaagaatcacaacggcttctaagaaagtgaagacgtcaagtgatgttctcactgacaaagatctctctcatttggtttggtggaaggagagattgcagacatgtaagnnaccatctactcttcagcttattgaaaggcttatgtacaccaatttacttggtttggaccctagcttgaggaatggaagtttaaaaga

SEQ ID NO: 315 - DNA, 373 bp, Arabidopsis thaliana
ttttttttttttttttttttacacaccaatatattattttgatgtaggagctctaaacacaaatccagttcatatgtacaaacaatcctctatggtctctactcatctcaattcaaaaccaaaaaaaaacaaacaaacagaaaatgcataagaacaagttcaaagaatagctcataatcatgaaacgcgttgaaagcttacgcagattgataaattattgtctcttgctctgtgatcttgaaactggagtactcatgtcagtgtctgagtttatctccatactcccttctcgcgttctagaacgccttcggtcctctcttggaatggggtattcttcagactcaagcatacgtacaacttggctcatcttcgg

SEQ ID NO: 316 - DNA, 373 bp, Arabidopsis thaliana
atcaacaatatagtagtaagtaagaagaattcacaaatatttcatcatattatgtagtaaaaaaaacaactagtaatgacaatctattaacgctggtgttgctgagaatactatcccttgaaactttgactctcttagatcatcttctggtgctggtagattaagatccaacggtagatatttcctctgctgttccatcgaacggcctatattgatctcaatctcttcctctgtactgtttctgcttacttctgcggtggctgcaacggggctaatcgtggttacggctgtcctgtgccgcctcatgtgaccaccgagagcttgcccggaagtgaactcagaaccgcagatggaacactcgtgtactttgttt

SEQ ID NO: 317 - DNA, 373 bp, Arabidopsis thaliana
gcggccgctttttttagtggcagccaaaataatgacaagaatttatattacaaacgcaccggttaggttcagtcacactaatcacataaccattttaaaagcaaaacattcgacacccaaaaggcccaaagcctctatctctagttctctacacaacacaatcctcctaattggttttgttcctgactgtacaaaagcagagctccaagaaaaataaaatttctagagctgcagcctaggttcatgatttgttttacacacacagctaagagaaaaaaaagcttcagtttgttagcccaaaaaatgacatgccggcaattatcagaaaccaacccactgtttctgtaagttccttaaagccgcaccattcccg

SEQ ID NO: 318 - DNA, 373 bp, Arabidopsis thaliana
gaagaagcttcaaaggcgattcctttgctttagctaactagtagtttcgtcatgtcttggtgcacgattgagtcggatcctggtgtatttacagagcttattcaacaaatgcaagtcaaaggagtgcaggttgaagaattgtattccctggattctgattctctcaataacctcagacccgtatacggtctgatctttcttttcaaatggcaagctggggaaaaagatgagcgtccaacgatccaagatcaagtttcgaacttatttttcgcaaatcaggtcattaacaatgcttgtgcaacccaagcgatccttgctatcctcttgaactctccagaggttgacatcgggcctgaactatcagcgctgaaag

SEQ ID NO: 319 - DNA, 373 bp, Arabidopsis thaliana
tgtcacgttctgtgtcaggctttgtgaatcactacaaatcaaaaggcaagctttttgagctaagtgatgggaactataagacagagcttcatcatccatgtattagtagaaatgtggggatgcttcttcagcagtataagtgttttggatcatcagcagcttctttaattcagagaaaccctttgttttcgtcgttggattcgaaagatgttagctactttaaggagatattaggtgaaaaaaacgtggttgaagataaagaaaggcttgagactgctaatacagattggatgcataagtacaaaggatctagtaagctgatgctcttgcccaagaatacacaagaggtgtctcagatacttgagtactgtga

SEQ ID NO: 320 - DNA, 373 bp, Arabidopsis thaliana
ttcaatttcctgataaacgagcagagagagatctgtcaaaatcacaaaccgtgaattcgggaagaataagccgatgatgcttcgtattgttcaaatcgcgtttctatgtctcgttctcgtcgccgggatctcgatctccacggcgatatcagagactgagactatatacgagatcctcctggcaaacggattaccttcggggatattcccgaaaggtgtcagagaattcaccttcgacgtcgaaacgagacgattctcggtttatttgaatcaggcatgcgaggctaaatacgagactgagatacattacgacgccaatattacggggactataggttctgctcaaatctctgatttgtctggaatctcggcg

SEQ ID NO: 321 - DNA, 372 bp, Arabidopsis thaliana
  misc_feature (1)...(372): n = A,T,C or G
ctttttttttttttttaactttcaaaatggcttccgattctggattccacaattttttttctaaatgacaaggaatcaaaatgtccagactatttacaacagaaattgaaataattatagcagctaatgactgaaaaaaaggaacaaagatctgctggtacaaagacccaaccaaatgttcttggaaggccaaatgtaacaatacacttcttttttttttttttttgtcttctcttttctttttcacattctactatcgaaaaaaggaaaacaaaatacttagatatgtatatatcnnnnnctaccaacaaatattaacgtctcacgaattggcttaaaagcctaagtcggagaaaaagatcactaaaatac

SEQ ID NO: 322 - DNA, 372 bp, Arabidopsis thaliana
ctttttttttttttttttggatcaaagtcttatctggaatcagaaagagtttctctcaggaaacagaacatgagaagaaaacaacgaaataaggtaacttgtctgagaagaaaccgattctcaaaccgaaagcagaaaacgaagataactcgagagacacaaacaaacaccaagattatgacatagatttaaagcctcctcaatgctcaattcttagatccggatcattcatggagggctcaaggagttagccacgtcgatcacgaacctgtacctaacatcagacttagcaagcctctccatcgcagtgttaatctcatccatcttaatcaattcaatatcagctgtaatgttgtgcttagcgcagaaatc

SEQ ID NO: 323 - DNA, 372 bp, Arabidopsis thaliana
agatgtggatgatccattcaaaagttttgaaactcttctatacacatacattctccggatgtggttgttactaacttcaaaatataaaaatttaacaaaacaattgttatcatcatttcctacgagtcattaaacccaatcccactcgccgtcgccggaaaacacctcggaaaatcagccaccgaaaacgatctccaggcacaaaaacccaacgacgactgagacgaagtcaaattaccaaaagacccttgactcctaggatacaacggaggaagcttcttcatctgatgttgatgatgatgtagctgcctcggaggagatccagaagtcgtcggacttgatcccggcgacgagtcacctccggaagaagat

SEQ ID NO: 324 - DNA, 372 bp, Arabidopsis thaliana
tttttaaaaaaacaaattatttttccctatcaaaattgttaattatgattccacgaattctgaaattatcaaaatctaaactcatttatatgaagataaacaacaatgcaaagtgactttcaaactgttagctcttacaactatttaagtctaaatctccaaacatatattaaaaagtgtgatattccgtcgccggaaaagcagatttcggccactctaacggccatgagtgaaactggttcaaaccgttcaatcacagaatctttacggtccagtcttggtccactcgaacacccggtttgcggatagtcaacacctttgtacccgaggaagctacaagcccacccattcgcagaggtcccatctcaatct

SEQ ID NO: 325 - DNA, 372 bp, Arabidopsis thaliana
tcgagcggccgcccgggcaggtatcaagcttggttgagagaacctaagaatggtcctactgagtatagaagcagaactgtgtttgaagatgcaactcctgtgatgttaagagactttttctgggatgatgagtttagaccaacttgggatacaatgctttctaattccactactgttgaagagtgtcccagtactggaaccatgattgttagatggatacgcaagttcccgttcttctgcagtgatagagagtatgtaatcggtcgcaggatatggaattgtggaaactcttattactgtgttacaaagggagtatcggttccttctataccgcctaacaacaaacaaaaacgcgtggatttgttctactca

SEQ ID NO: 326 - DNA, 372 bp, Arabidopsis thaliana
ggccgcccgggcaagtacccttaatcctaaacagaagattgcattggcgaagcagttgaatcttcgtcctcgtcaggttgaagtctggtttcaaacagacgagccaggacaaagctgaagcaaacggaagtggactgtgaatacctaaagagatgctgtgagtcactaaccgaagaaaaccggaggcttcaaaaagaggttaaagaattgagaaccttgaagacttccacacccttttacatgcaacttccggccactactctcactatgtgcccttcttgtgaacgtgttgccacttcagcagcacagccctccacgtcagctgcccacaacctctgtttgtccacgtcatcattgattccggttaagcct

SEQ ID NO: 327 - DNA, 372 bp, Arabidopsis thaliana
ccacgcgtccggctttgcttaccacatccatcattcattcatttcctttctttctttcttcttcttccgtttcttttgcctctttcttttgtcttcttccttctatttttttgtggctttaaatttattgggttttgttcttcttcttcttctatagccgtttcatcttcacaatagcatcttcttctttttttccctgtcaagatcctgaatcatcggatctagaaggaaactagagtttgtgaaatcagattaaatcttgtgagaaatctctgaaaaagctgcaggtttctatacttctgttagtactctaattcaaccgagaaagtcgaatacatacacacattcataacacttttgaggaagatgtta

SEQ ID NO: 328 - DNA, 372 bp, Arabidopsis thaliana
tcctcaaaaccctaacacagatctctcgatcttctccgatctgtcttttctcctaatctggtttagtttgatttaattggattgaagatgtcagacgctttgaatatgactcttgatgaaattgtgaagaagagtaagagtgaaaggtctgcagctgcaaggtctggaggtaaaggagtttcccgtaagagtggacgtggacgtggtggacctaatggtgttgtaggagctggaagaggaggtggacctgttcgtagaggtcctcttgctgttaatactcggccatcatcatccttctccataaacaagcttgcccgcaggaagaggagcttgccatggcagaatcagaatgatttgtatgaagaaaccctt

SEQ ID NO: 329 - DNA, 372 bp, Arabidopsis thaliana
tatgcggcagtaggtgctttgcaacacaagataagagcttcttattctgaggaacttaggatagaaaaatcagaactggtgtctatgatgattttggatgggtgcttcattctcatgttgttacttatcgtgtcaagaaagatagatttggatatgaataaggatccaatcttcacgatcccctggattttggcatctattcagagtgatcttctcctcttggaaaatcaggtccctttctttgttcttcgaactatatttgataaatcaggaatagggtcacctggtgatctaaacaggatggcgtttagcttcttcaacctctcaatagataaaccagatacatattgggcgaaacacagagaccgcggg

SEQ ID NO: 330 - DNA, 372 bp, Arabidopsis thaliana
ctcggaagccagagagaagagggaagaggaagtctaattcctctgcgttttttgcaattagggttttctcaattggaatcgaaaatggtgacagacaagagcaagaaggcgaaaaccgaagaagaaaacgtcgagcaaatcgatgcagagcttgtcctctcaatcgaaaagcttcaagagatccaagacgacctcgagaagataaatgaaaaggctagtgatgaagtgttggaagtggagcagaaatataatgtgataaggaaacctgtttatgacaagcgtaacgagatcatcaaaaccatccctgatttctggttaactgctttcttgagtcaccctgctttatgtgaacttttgactgaagaagaccaa

SEQ ID NO: 331 - DNA, 372 bp, Arabidopsis thaliana
ttccatggctctctttctccttcttcttcttgtgtttccgcatatggataaagcccttggcgcacaagaggaagcccagaaacaaaggattcctcgtttcagatgttctccacgaatccccttttgtacaaatccaaacctaccttctcctccgccccacaggtctttcaaaggcacactcgaacctggtcattgacttcactctagcttcgaatgcgtgtgaacgtgtgcatgtttcttacattgtgctttggtttgtggtttctatccttgtttatctttgcatgtgtttgtcatattttacagttttatcgaaccgtcgcttgaataaataaatttgcatgtccttttatgtttaaaaaaaaaaaaaaa

SEQ ID NO: 332 - DNA, 372 bp, Arabidopsis thaliana
  misc_feature (1)...(372): n = A,T,C or G
accagggtgagcaatttacacaaacattcccatcatgttcagggattaatagcatcaacatctcaataaaagaagaatccaaatacagtttttttttttgttaggttagctaattaacctctggctttaagctcggcaagtctcctggttaaatcatcctcctcaactttctcttcagtcttggtaggaatggcatgaccagcaggctgaggtagtccaacagaaacttcaagaccgtaatcatctgctacttgctgcatcaagctgttgacttctccttctggagtcnnnnatgaagtagagccagccattgcattatccatgaactcagcttggacttccatgttcacaaactgtttctcaaacggatcc

SEQ ID NO: 333 - DNA, 372 bp, Arabidopsis thaliana
aacgatcggggaaattcgagctcggtacctcgagcggccgcccgggcaggtacttgttcttgttttgtctctacggtcaccgacggtggtgaagcttcgattatattggtgggttcttgagaaatgtagttataaagattgaaagatttgattctgtgaagaacagaaggagatctagacaagaatggttgattctgttcgattgaagctggttggtgaaagttgttgttgctgttgtcttcaggtgttgaaggaggaaactcgagatgagacttgtctggagaagtgaaagaagagaagtttatggatttgagacgatgaatcatggaaggagagcgttggatctgagtttgatttgggtcgttggatttg

SEQ ID NO: 334 - DNA, 371 bp, Arabidopsis thaliana
cttcccaacaatagccttctaaagatgctctcatgagcaagaacaaaaagatgaaaaccaacaaaaaaaaaacacaccaagaagatgagaaaaaatgttgcaagattattgctctgttctcacttttatagcccaactacataaatcataaacgttcttgtatctaagaacaaagtggttcgatggaacgataaaacaatcgaagattttacctaaaggagatgagtttcttgaacctttaagattggatccaagaagaccgcaagagcttttattgtgaggcattattcttattccaaaactctgactattccaaaaccatcgcttaagtgtgtttattcacgatcgagtctctttatttcttcgcaaag

SEQ ID NO: 335 - DNA, 371 bp, Arabidopsis thaliana
tttttttttttttttttttttttttttttttttttttttttttttttgcaaaacttcttcatggttttttaaagtctaaaatgagcatctgacagacattgtatcccccttttagttttgctaaaacttgtttctatctccgacaaactagatgctaaaatacttcaaaagaaaacgataaaacaataaagagactgaaaactttggtcttcaaatcttcaacctttcacctatagctcatcatgagcggtggcgtctttctcagaggtttcctcgctatctactgatttggtctcctcggccttagattcagaatcggaatcatctcctccttcatcatcctctggttcgtcttcagcatcagattccgc

SEQ ID NO: 336 - DNA, 371 bp, Arabidopsis thaliana
ttttttttagctaaaacttcagtttcataataggcataatgagttatatattcaaaagtataaaatttatatcattgcaacttaaacacgaaaaaccaaagacggtctttagagtccagaagtgaagggtatgccggtgcgtgggagccatgctgtaccagcgataaactttccaacagtgaaagcagatgcatcggaagctctacccaacacatgaaaccctttccaactgacacgccacctcgtggatgaagctggtccagtattcttatattctgcatagaagagagtgtccagaccaaacaccgaaccttcaatccacggagaccacccgactggactcacaacattatccaaatacgtctgaagaa

SEQ ID NO: 337 - DNA, 371 bp, Arabidopsis thaliana
cggcgagtttaatcagtaaagccataaagaatgtaacaaacgaatacgtgatgattgggatagagtatcttaagaaccaaaaagatctgaagaagtttcaagatctacatgccttgggaagcacggaaggtccattctacggaaacccaaatcttggagtggtgagctggttaactttgccaatgtacggccttgatttcggatggggcaaagagttctacacgggaccaggcacgcatgactttgacggcgactcgctgatcttgccggatcaaaacgaagatggctcggtgattctcgcgacgtgtctacaggtggctcacatggaggccttcaagaaacacttttatgaagatatctaggccttatat

SEQ ID NO: 338 - DNA, 371 bp, Arabidopsis thaliana
tatgcgtcacgtgcgaccgtgatatccactcggctaatccgttagctcgccgtcacgaacgcgttcccgttactccgttttacgattccgtctctagtgacggttccgttaaacacaccgccgttaatttccttgacgactgttacttctccgatatagatggtaacggaagccgtgaagaagaggaggaagaagctgcttcgtggctgttacttcccaatccaaagactacaacgacggcgacggcggggatcgttgctgttacttcagctgaggaagttccgggagatagtccggagatgaacactggtcaacagtatttgttctcggatccggatccgtatctggatctggattatggaaatgttgat

SEQ ID NO: 339 - DNA, 371 bp, Arabidopsis thaliana
  misc_feature (1)...(371): n = A,T,C or G
aaaaaatgagtcaacacaacatcttagaagctctaaatgtccgggtcgtgggtacgggtgatcggatcctgtttttggcccatggattcggtactgaccaatcagcttggcacttgatccttccttacttcactcaaaactacagagtcgtcctctatgacctagtttgcgccggcagtgtcaaccccgattacttcgatttcaatcgttacacaactctcgatccttacgtcgatgatcttctcaacatcgnngattcactcggaatccaaaactgtgcttacgttggtcactctgtttccgctatgatcggaatcatcgcttcgattcgtcggccggagcttttctccaagcttatcttgatcggattt

SEQ ID NO: 340 - DNA, 371 bp, Arabidopsis thaliana
tctggaaatttccgtttatccgattcgttctcacgagatgatggctcgttaccacaggagatcgatgatcttgtgcttagttctgctctcattaagcatatcgccgagccaaggcttcctagggacagaggaaaagatcaaatccgctgtcttttactcaccaaaacttgtgatgaatccaggatcagttgcaaatccttacttattcgacatcgatttcccaagaggtcatatcggcctcaaagctttcgatgctgaagtggttgacgaagcgggcaaacccgttcctctacacgagacctatctccaccattggattgtcgagccatactatgtacgtaaaggttccaagcttccacagagagaaatgt

SEQ ID NO: 341 - DNA, 371 bp, Arabidopsis thaliana
  misc_feature (1)...(371): n = A,T,C or G
actcgtccccattttcttcttgttaatcttcaccaagaagatcaaggagtcaaaacaaaatcttcctccgggcccagcaaagcttccgatcatcggaaacctacaccagctccaagggttgcttcataaatgtcttcacgatctctccaagaaacacggacctgtgatgcatctccgtctagggtttgccccaatggtcgtaatttcatcaagtgaagcagctgaagaagctcttaaaacacatgacctngagtgttgttcaagacctatcactatggcctcaagggttttttcgcgtaacggtaaagacatcggatttggggtttacggtgatgaatggagagagctgcgtaagctttcggttcgcgaat

SEQ ID NO: 342 - DNA, 371 bp, Arabidopsis thaliana
gtctttaatacttttgttatctgttcgtgaaaacaacgcttctaattcgattagaggttctcaattctcaacgaaaccttgtgaggagatttacatcgtcggagaaggagagacacttcacaccatcggcgataaatgcggcgacccgtttatcgtggagcgaaacccgcatatccatgatcccgatgatgtctttccaggtcttgttctcaagatcgcacctttttacttcaacaggaaattgtaagacatataacaaatacgtttcttttttctttctcttttctcttcttttaaaattttgtttgaagcatactttaccttaagtatgtatgtatatattactaaaggattcaaaaataaatacagag

SEQ ID NO: 343 - DNA, 371 bp, Arabidopsis thaliana
ctttttttttttttttttttttttttttgattgaaggtgattctttcaatggtatattaaacttacaacacagttgcaaatgatatattacagaagtagggacacatcgtcttgtttagactgaggaaaccagaagatcatctgaagtggtaatacctttaaatacgttcttctctgaaggtaaaccagctacaacactctgttcaatgccacattcgttcgttcctctcctgatcttgaagtaaccatcatcaccccagcttcggttccattgatttgcaagcaaccaataatcttcgccgtcatcagaagttccccagccaatgagcttaactgcatgacctccaatcttagtacccgttatgtacttg

SEQ ID NO: 344 - DNA, 371 bp, Arabidopsis thaliana
ttctctccgccgatctcttcctcacttcagaaccctaatctcatccccaagatctcaacctctcttctctccaccaagcgtttctctctaatctccgtccctagagcttcctccgacaatggtacgacttcccccgtcgtggagattccgaagcctgcttctgtggctgtagaggaagttccagttaaatctccagccgaaagctcctccgcttctgaaaacggcgccgttggaggtgaagcgactgattcgagtactgagacggtaatcaaatatcagaatgcgaagtgggttaatggaacttgggatctgaaacagttcgagaaagatggcaaaactgattgggattctgttatcgtttctggttagat

SEQ ID NO: 345 - DNA, 371 bp, Arabidopsis thaliana
ttttttttttttttttttttttttttttttttttttttttttttttttccagaaactacattaatccaaaaagaggcaccaaaacattacaagttacagccactacttctaaacttaacccgaatagcttagaccgatcagacccagcctaagcagaacatggaaaccgcggaagcaagcaacattacgctacacctacacgcctacactacataaacagaaactactacaactaaaaatacaacaacagagccagaaatgaagaacagagagagccttactgaagttgttctttttctgttccctacccgactgattttactcaatcaacctcaattactttttgacgttttggtttggttgttgcttta

SEQ ID NO: 346 - DNA, 371 bp, Arabidopsis thaliana
cggccgcccttttttttttttttttttcgatgctaaagacatgcaatacatgtagactacatgatgtagtcatttatattaagtccaaatccagctccaaggtaacaattaaagaaggatacacacaagtaattatttccattggagattttgttcaaagaattttcagctcaagatcatagccgactcgggacttgtgcctctcaaacagatccctaagcgcttccacatactggccatgaaacttagcaatctcttcgtcagttggcttcagagtttttgtgacttctattggtttaccaacgaccacatgcataggctgtcgacacggtaatggtgatccaaaaactccccagaagcagatcggggtg

SEQ ID NO: 347 - DNA, 371 bp, Arabidopsis thaliana
cggccgcccttttttttttttttttttttttttttttttctctcgaaaaattttatatcaaagcacaatccaagatgatacagtatttcatctacatcaaatccattttatttgaagaaacataagtctgatgaagagagtaataacagcgcgaaggcgaaaatagaaaccgagcaaacacagaaggcacaaagagagagagagagagagagagagagcccacacctcagaaaataatgtctgaatccttctcagcaccaccaacaaggaagttacgagcagcgtttatcgaaatccctctctgcatagagatgtcttcaagaaccatttcctcagcaaactccttagcattagctgcctgtcgttcgact

SEQ ID NO: 348 - DNA, 371 bp, Arabidopsis thaliana
ttttttcaagaaaacacacataggcacacaaaaacccacaaatgatgtgacaaatctgttcaaaagcttaaaaccattatctgtttcaccatatttgtcattcaagcatggcagcattcaaccgccatcgccaaaacatgttttacaaatggagttactaatagccaaaccgcagattgcgaatcttcaaactcgagtgtggtcattacaatgtcatgaggtggaactagagaaaaggattgatcactttttgtcatcaccaccattttcactagcttgactctggtttggctcttgatgttggagctgatgctgatgttgatctagagtcatggccaaaccatcgcctctactgccacgcattgcagccg

SEQ ID NO: 349 - DNA, 371 bp, Arabidopsis thaliana
  misc_feature (1)...(371): n = A,T,C or G
catctaattttttcgttgttctttcttaatacaaaaatctagaaaatcagtagtctaaaatggttgggttacttctcctatcttgagaaaagagatacaatcggatatatatatatagntngatagatacacacacaaacttacatatatctaaagcccttcttgctttctctctctctctctctgtttttttcttttatgttctcttctttgttcattcctcttcttctcctctctctttcttcacaacagattagtcgactgnnnttggttgcgtcatgcaacatctgaaacgggcttttctcacattcgtcattatctcagtttccgccgcctccagaagattgacaatctctgcaaaacaaggacgg

SEQ ID NO: 350 - DNA, 371 bp, Arabidopsis thaliana
  misc_feature (1)...(371): n = A,T,C or G
tttttgaatgaaacagagtttaaacgataacacagagtacgtagttgtttttccgctatatcggcgaattcaggannaagagatcttaagcacgttttannnctaccatgaagataacaaccacagctaatccaaacagagaacgagggtcattgaacaacgtctgcttcttgtcttttccatcttctgtaactgatcctaacccaaacaagtcaccaaagtaggaagatacattttccatcaaccgaacagcttttagcttcatgtcctgcagaatctctaagagttccattggcttagtttccacgacttcacactcagtcgtgctcgaacgttcagattggtcgtcattgtcagattcaacttgagag

SEQ ID NO: 351 - DNA, 371 bp, Arabidopsis thaliana
tttttttttttttcagggtaacttttcatttacgtaaacacgacagagtcaatacttgtgacgatgagcatcaatatttactactggcaaagtaacttaaacaaaaacaaaaacacgggtaagggtctaagggaaactacttaaaccagtaagaaaaccgatcactatcttcatttcatttgaatcaacataagatctcaagatgcgtttgtatttgcccgggttaccagaccaggtagacttgttgatgatcgcttaatctttagccagtactcgttatacacttttttcctcgacatcttctcgaagaatctactccaaccttccataactcgggtcagcctaacactcttgggtcttcctataaggta

SEQ ID NO: 352 - DNA, 371 bp, Arabidopsis thaliana
  misc_feature (1)...(371): n = A,T,C or G
ttacacacgagattccaatatgagcagagagtaagaagaagaagaagagagttacaacaatgaaaacactcaggagagacatcatgatacaataggcagaacacaacaatcaatggtttgctgctaaacaacttgagaaatcaatttttttctgactatgacactgcagaggagacaccaacacatcttgaagcacagatactatcactcctcattagacatgcagaccgttttaccggagttgctgctttnnctacttgtgacgccttctgtgatgataagccagtngctgtgtttggagtctgtggaggtgtaaacaccactgaagctgaagacgattgagcatgaactgaatcagaaccttcgtcttc

SEQ ID NO: 353 - DNA, 371 bp, Arabidopsis thaliana
attcgcggccgccctagttgtacgaaagcttgagtaatggggtctagattaaacttcaagagctttgttgatggtgtgagtgagcagcagccaacggtggggactagtcttccattgactaggcagaactctgtgttctcgttaacctttgatgagtttcagaactcatggggtggtggaattgggaaagattttgggtctatgaacatggatgagctcttgaagaacatttggactgcagaggaaagtcattcaatgatgggaaacaataccagttacaccaacatcagcaatggtaatagtggaaacactgttattaacggcggtggtaacaacattggtgggttagctgttggtgtgggaggagaaag

SEQ ID NO: 354 - DNA, 371 bp, Arabidopsis thaliana
aacgtctagcaaacgaaagaaacgcgataatcccaccgaccaaacgcagacacagaaacataaaccgcagaaaccgaagaaagcagtacctccgaagcagccatcttcatgggaccaaatcaagaacctattgacttgcaaacaaatcgaagggtcaagagtccatgatccttccaagaactctcaatctggtccgtccatgactactaacttatctccttccaagcttggctcgtcgtgcagctccatttgcagcttcagagacgtggctcacggcaacactcgtgtggttcatagagctgatcactcaccagacgtaggtaactcggctactcctaactcggagactcggcttctgactcggaaacctg

SEQ ID NO: 355 - DNA, 371 bp, Arabidopsis thaliana
  misc_feature (1)...(371): n = A,T,C or G
ccacttcaggcacctataggaacaaaagcagcacaacaacaacaacctcctcctcctcagccttttacctctggtcctccaccaccgcaatacaccgcagtaccaccgccacgacaagtagtaggattaccagatacatcagcgtatactcaggtgacttacactggaggaatggggaaacaagtttattacacggaggctccacnnnngcagtaccatggagttggcttacctgtaactggtatgagtgaattgagaactggaccggacgggaagcttgttgctatgaacatggcacctaaagtttcatctcagagttcagattcggctgtttgattgatgaggtatttcatatggttgaatcagattat

SEQ ID NO: 356 - DNA, 370 bp, Arabidopsis thaliana
ctttttttttttttttttttttttttaaaccaagcaacaatctcatgtgtatttttacatctagagattctaaattcgatttttctaatttatacacttacataataaaatcaaaggcaaaagaagtgtgaccaagaaattcactcttcacctcactcgtagaacccaaacccaacaaaaaaaaacccaaaacgaagccacacaaagtccaaaatagaagctcactctatgtacatcctattttgttagcacccttaccggaagtttcttttcaaaaaagaaaaaaacctcccaaggccatttgtgactctaaaattttcagaaacaaaaaatgaaaatccttgtcttttcttcagctcagtgactcatg

SEQ ID NO: 357 - DNA, 370 bp, Arabidopsis thaliana
tcgagcggccgcccgggcaggtactgctacatgtggtggaagggctggtcgttttcagatgcaatgtttgtgacaaagaaaaatatggctgatgcggttgcctctgtttcgaaacaactagacgatttgtcagacacattagcgtcaacaaggaaacatctttctcagaagctagcgaccttggattggaaggtggaagagcagaatgagacatctaaaatgatcttaagtgatgttactgagatgagatcaagcatttcgcaaattgggtttgattttaagcaacttaatgaaatgatttctggaatagaagggaagattgaaagtcttgaaagcaaacaagatgtgaccctctctggactatggcatc

SEQ ID NO: 358 - DNA, 370 bp, Arabidopsis thaliana
tcgagcggccgcccgggcaggtactgtcgttccttttgatgatagtcttaacttccacaaggttattgcaagcgggatagtcgtcggtgttttgctccatgcgggtgcccatttaacgtgtgattttccacgtttaattgccgcggatggggacacctatgagccgatggaaaaatactttggggatcaaccgactagctactggtggtttgtgaaaggagtggaaggatggactggcattgtgatggttgtgctaatggctatagcctttacactcgctacgccttggttccgacgtaacaagcttaacttacctaacttcctcaagaagcttaccggtttcaacgccttttggtacctcggccgcgac

SEQ ID NO: 359 - DNA, 370 bp, Arabidopsis thaliana
cgcccgggcaggtacctttgctaagataaagtcctccaccacgaacaagaagccaaagaccaccatcagctctccatcccatgttctgaattcttctagcaacagctctattgtgtggttgccagtaaggctgcccaggctcccatgtcagaaagaagttaccacggctcgaaacagcgacatatcttccatcaggtgaacgattaacagcactgaaagttcccgtgtagtaactagcaccactgattccactggatactgttctgttcaaggtagctgaaacagtttcctgaatagcagctttccagttatatcccctgtttgaagtaacataaatagcaccttcatcagtaaccatctctgcactctt

SEQ ID NO: 360 - DNA, 370 bp, Arabidopsis thaliana
ccgcccgggcaggtacagcgctgagactgaggatgaagatgctggcgagacaagcaactacagcatgggtcaagagtgtttggatcggttagcaatttctctgggaggaaacaccattgttccggttgcatatcagcagttttctgcttacttggctgcctctgagtggcagaaacatcatgcttctttgattgcacttgctcagattgctgaaggttgttcaaaggtgatgataaaaaatctagaccaagtggtgtcaatggttttgagccagtttcaaagtcctcatcctcgcgtaaggtgggctgctataaatgcgattggacagttgtctacagatttgggtccagatttgcaaaaccaacatcat

SEQ ID NO: 361 - DNA, 370 bp, Arabidopsis thaliana
cgaagaacaaaacaagagaaagatgcaaaactagatatataaatatatatacacatattatatattatgagcaaaaaacctaactaaccctgccaaggctttggatgaagctgatcagaagcagagctatttatgcaacttccaagaccagcaaaacttagaatctcgttatgagacattaacggtcttagccccaagaaatctctcgtcaaaccttctcctccaccgcttttagtactcttctctgatcctgcggcggctgtaacttcgtttgttctcaagaacccgccaaatgtatcgtcgaatgcttcttctctgccgtgattatcaaacccggatgcgttgtagtcttgaaacaaaacatgattgt

SEQ ID NO: 362 - DNA, 370 bp, Arabidopsis thaliana
tttcatattttctttttggtttgtgtgctacttaataaaatatatgggcataatcacataaccaaactacgttactatgtaattgcacaaaaagttactttctaatactgtcccctctctctgtataatccaaactcctccataaaattctcaactttaaatccctaaaaccctgctttcaaatcccatcttccacctccccaattcacatcatatgtttgttgtttctacgcgaaccgctctcttccgctattgtcacctgcattgcttttgcgtttgttcttcaatacagtggaagaagatggattgctatgccagttcctctttctctgattgatgaaccaattgtttatctgttttagctgcaaac

SEQ ID NO: 363 - DNA, 370 bp, Arabidopsis thaliana
ttttttttttgaaaaggaatgtagtacactaataatcaaatggaatgagaaatgaagccacaaaagtatctgcaatcaaaatatcctgctatctccatctcaagctctcaatagtatcctctccgaaagataataaatcccaaaagaattcagtcccaagcaatacagtggaacaaacaaagacgacataaaaataaatgcaagtaacacagtcacaaaagattccacttagatcataaaccagacgagaacagatccaaatactaagctcgaaaccatcttgctagctccattctggtcgttcacatcagtggggctaggagcaggagagatagaatcggtgctaggtccaggagcgtcgcttgatgga

SEQ ID NO: 364 - DNA, 370 bp, Arabidopsis thaliana
gatacaaattactttagaagcagcttaactttcacattcagagttcagccaaaaacaatcgttgaagagtgtaagaatctcgtctaaacaaaatgcaagatagggagagagagagggcacagctagatctcagctttaatatccacgccttggaggacgctcttccgctacattcactctgattgctctaccctccaagttctgtccatcgagggcagagatggcttcgttgagttcatccacgtcagacattgtgacaaacccgaatccacgtgaacgacctgtctcacggtcgtaaaccaccctagcttccacaactttaccatgctcactgaaaagctgttctagacggccattgtccacatcccat

SEQ ID NO: 365 - DNA, 370 bp, Arabidopsis thaliana
gcgccagaatcgagcggccgcccgggcaggtgaacaatggcttcctctatgctctcttccgctactatggttgcctctccggctcaggccactatggtcgctcctttcaacggacttaagtcctccgctgccttcccagccacccgcaaggctaacaacgacattacttccatcacaagcaacggcggaagagttaactgcatgcaggtgtggcctccgattggaaagaagaagtttgagactctctcttaccttcctgaccttaccgattccgaattggctaaggaagttgactaccttatccgcaacaagtggattccttgtgttgaattcgagttggagcacggatttgtgtacctcggccgcgacc

SEQ ID NO: 366 - DNA, 370 bp, Arabidopsis thaliana
tttttttttcaatctcaagataatatataaaacaacaaagcctgaactttatgaatccaacgatgtgaattaaaccactcttatacgaaattcaaattcaaacaacaacatataaccaaaaaaactcgtaaaacagaggaccctaatccataataagggattcttacaatcccctttgcattggagatggtggagctccgaggagactggcctgttgaagctcaatttcgttgatttgtgcctctcgatccatctcgatgatcaatggaacaacaagtatgagaaaagttgtcccagcgatccacgctgcttttccggtgctccggagcagtttcttcgatacttcgacggcatctcctgctgcgcgtct

SEQ ID NO: 367 - DNA, 370 bp, Arabidopsis thaliana
  misc_feature (1)...(370): n = A,T,C or G
tacgtaagcttggatcctctagagcggccgccctttttttttttttttgtgttgaatctattatttgatgttgattactcttttatttgatgttggatttacaacttgagatacgttgcaggaatacaagcattcattttgattagttataaataatatatataggtgatctaaatgataacatagctcttgccaaagtttacttaaatgatccggacattgtgctagagagctgggacactgagcgatcccacgtcaagaactctgtgcaatatctcaccaaccctagcattgatttncaatggaacaatgtcatcagctcttgtttcgcctatatttacaattgcggtcatagcaccagcctcatgag

SEQ ID NO: 368 - DNA, 370 bp, Arabidopsis thaliana
gcggccgcttcaggttttgatctggatgttcttcttcaaagggcccaggcttgcaaagttcagagtagcatgtggtccaaaattggccgactcaaacgctcttttatgcctaagcttaaaggaaacagtaattatgggtcaggagctacaccagggctcatgtcttgtattgctggaaggctcttgtgtgatacagatctgtgttctcgtgacttgttgaaggaggtcagttattctttaacggacctctcaaagacacagctgaaccgggacaggaaagagatagcgcctaatgatattcccaaaatgtttcagtcatccaaaacacttgtggaacttattgaatgtggtgagacggatgcatggttat

SEQ ID NO: 369 - DNA, 370 bp, Arabidopsis thaliana
  misc_feature (1)...(370): n = A,T,C or G
tctctctttctttttttctcaaagcttttttccttctccctaaacgatgaagattttcgtgaagactctcagtggttcgaacttcgagatcgaagtaaaacctgcagatagggtttctgatgttaaaacggctatagaaactgttaaaggtgcagaataccctgctgctaagcagatgctgatccaccaaggaaaggttctaaaggatgagaccacattggaagagaacaatgttgttgagaacagtttcattgttatcatgttgtccaagaccaaggcttctccaagtggggcatcaaccgcatcngcaccagcacctagtgctacacagccacagacagtagctacacctcaggtttctgctcctact

SEQ ID NO: 370 - DNA, 369 bp, Arabidopsis thaliana
atttttaaccttaatttccacattggcgcgaggaagataaaaaggttgagattattatgaagctttttataatttacaaatttgtaaaaacttctgaatcaggctgtaagtttaaggtgaaagctcagccgttgatgatggtgattacttgagcagcggaagagtctcccgtactttgttgccggagccattttcccatgacattcctctgtcaccttctataaccagaaacgtcttcttccccacctggctagccagaatctggttctcttctatcagcaacttctccctttcttgaagtgacttcatatcctccatcattagttctgtcttcttagctctaattactgacagagcagtctcgagctg

SEQ ID NO: 371 - DNA, 369 bp, Arabidopsis thaliana
  misc_feature (1)...(369): n = A,T,C or G
ttcttttattaagaaaaggccaaagaagagtgtccaaaagagtacaaatcaacaaaggcaatgagagaaaagaatcattcttccaaaattcccaattgcatacaaaaacaaaaattcaaaatcaaatctttctgttttgttccttctcgtataaagcaccaaaacttcatcccactctcaaacccaaaccaacaccgacaccaacagcagacctgtgtatttggggaaccatacccaatgacacatttcactaacaatttcatccttccctcctaatatacacttcctaccataaagatagnnattttcattttgtaacttctgaaggatggaccgacccatcatcatccctcccaaaagaattagatg

SEQ ID NO: 372 - DNA, 369 bp, Arabidopsis thaliana
ctttttttttttttttttttttttttttttttttttttctctcaaaatcttcggggttttattaaagaaattaaagtaaacagacccctgaggaaaaataaagaagtaatgaccatacaacaaacaagactgactctatgtaatctcccaaaaacatcgacgacacaacatgaaacaaaaaaagaaccaaagtagtatagtacacagtttgtggaaaccccaaaactcgagactaaaaatctttatatacaaacctgttttttgggtcatatcatattggctccttcaggactctaacagttgttggacaatctgttctctggccagccagagagtagtaagccaatatatgagccggcggacgcgtgg

SEQ ID NO: 373 - DNA, 369 bp, Arabidopsis thaliana
attccctttttagtttcggacaaatacaagatataaagcttcaaaacaaaggaatttcaaaaacattaatagtaatactatataacaaggaaaacgtaaactagaatcaaccaccatgatatatttgtttagaatggcctaaaataagggaagagaaggtttctgttgggagaattttttttttaaaaagaaagaatggaatcgtagccaccacatgatttgaggtgtttgtaaagagagacgacctctaagatgcgactggttttgaagtggccttcttaatggcttccgcataagtcgtgtgctggtatgttaaggtagattcaagcaagtcccaaagcgacgtcttcgggttccatccaagttgac

SEQ ID NO: 374 - DNA, 369 bp, Arabidopsis thaliana
gagataagtaaaaaatcaattgaaaggacaataaagagagaaagatagttcagagaaaagaagaagaagcgtttagttacaaacctgtcttgatgagtattttttgaagttacttcctaaaaaaaccacattacacttataaattctccaagaacccctaacaaagataataattgtagtagtaatataacacacgacgattataaaatataaattacattcaccaccaccaaacctaaacgtagagttaaaacactcagagaatgatctctggcccaagaagttcttgtactgtcttggattcaaagtcagtgtatagaatctatgttcttgcttagctcttccagcttcttcattctcatcttttcg

SEQ ID NO: 375 - DNA, 369 bp, Arabidopsis thaliana
aagaaaccttcttccttgaagagagggttatgggatctctaagagagatcaaagaagaaagctcaagtatggaagaaagctgtgatccatttctctctatgttttgtaatgggtttcttcactggcttcgctcctgctggtaaggcctcatttttctctaatttcgaaacgacttcttatacttctacaaaatctccgattcctccccaaccttttgaaaacgctacatacacacaacattccctcctcaatagaaccttgatcaattcccaaagccaagctccagctcccgcagagtcgcgagaagctgaaggagaaacaagatctctctccgagaaagaagatgagaatcaagtaaaagtgacacca

SEQ ID NO: 376 - DNA, 369 bp, Arabidopsis thaliana
  misc_feature (1)...(369): n = A,T,C or G
gttcatcggcggcggagagtttgaaacggcggaacgacggatacgagtcactgtgtcaagtcgtacaacaagattcagatcggagactcatcaccattttcgtaatcttcttcattgtgattcccgccgtttcgattgctgtgtacaaagtcaaattcgctgatcgagtcatccaaacggaatcatcaatacgtcaaaagggaatcgttaaaactgatattaatttccaagaaatcctcactgaacattccaaggcttcagagaattcaactaggcactatgattatccagtgtnagcttacattactccatggaactctaaaggctatgatatggcaaagatattcaactcaaagtttacacatttat

SEQ ID NO: 377 - DNA, 369 bp, Arabidopsis thaliana
ctccaaaatttccgtgcttttgttttcgtagataacgaacaatggctgatgagattgtgccgccggcgactcaattagccgccgtatccttagaaaacgatggatctacggtgcaaagagctcaattctctaaccgggttttgattcgaacgattttggatcgacctgacggcggagctggactcgccggtcaaacggttcgaatcggtggttgggtaaaatccggaagagatcaagggaaaagaacgttttctttccttgcggttaacgatggatcttgtccagcgaatcttcaggttatggtggatccgtctctctatgatgtctctaacttggttgctacgggaacttgtgtgactgttgatggag

SEQ ID NO: 378 - DNA, 369 bp, Arabidopsis thaliana
gtgttgaaggagagtgggtgagaagagctttgactactttgattcgaccttcttcgcatcatctgaaaagacgagctgcttatcagccacgtcctagtcgactctcaatcatggcgaaagctgatgagaattgattttgatctggattttggttaattcaggtttgttttgtttgttgttcttctctctttaaacgaaaaccaccacaggatttagtagatccggcgaagaagtcttgttatgaagctgaggtctgcgaagaagaatcatcctcgagaaatcgagattttgtaaaaggaagaaacacacacctatcataatttttttgttgttgggtgaaagaagatgctagaatgcattgtacatacg

SEQ ID NO: 379 - DNA, 369 bp, Arabidopsis thaliana
acaacttttgttcaagctgactcttcttctttcaaacaagtcgttcagatgctcaccggaagctcctccccaagatctccagactctccgcgtcctccgacgactccttccggcaagggtaattttgtgattccaccgatcaaaaccgcacaaccgaagaaacattctggtaacaaactttacgagagaagatcacacggcggatttaacaacaacctcaagaacagtctcatgattaatacactcatgatcggtggtggtggcgccggaagtccaagattctcgccgagaaatcaggagattttgtcgcctagctgtcttgatttccccaagcttgcacttaacagtcccgtgacgccgttaaagcag

SEQ ID NO: 380 - DNA, 369 bp, Arabidopsis thaliana
ccacgcgtccgtccaactaatctcccatccattccctctctgccgactagtctcccatccattccgttcttctctcccccgccttctgcaactacttcgagtccttgaactatcatcacttcatgtgattgatgatgtatattttattataagattgttgtaattagttgtttcattgtggtgtgtttttgtttgtttaattacgcatacccccgtttgatgatttgtattttgtacctttaatttccttttgattattaatatgttgtattttaaatttgtttgtggtttgttaaagtgcttacttggttctttactcatagtaatatataaaaaaattggtgacgtttgataaaaaaaaaaaaaaag

SEQ ID NO: 381 - DNA, 369 bp, Arabidopsis thaliana
aggtacacttctatcctaaattcctgggaatgaagagagctcaacagggaataaaggctgaaatcccaggaatcaacccttattcttctcccgtgagctttagaaaagaccaagtccctgcacgggttcaggaactctggaactgaaaagctttctaactcacatcttgccaatcaatattttccaaaagttcatattgaagttaagacaaccctaaaccccctatgattaggctttcgtacgaattatcgtagctgaaatgtatctcgtaatcacatcaatcccaaagaacctcggaataaaaatccgtgaagcgaagaatcaaatcggaactggtgttattcgatacctgcccgggcggccgctcga

SEQ ID NO: 382 - DNA, 369 bp, Arabidopsis thaliana
ccacgcgtccgaacgatgatcagcttcaagaacaatacagtgcaaaagaagtctcgagtttgttcgaagagaaagaagcgagtttggaagaagtcaaacaagcttttgatgtgtttgacgaaaacaaagatggtttcattgatgctatagagttacagagagttttgacaatcttagggtttaaacaaggatcttacttagacaattgtttggtaatgattaggtcattagatgggaacaaagatggaaaaatcgattttaacgagtttgttaaattcatggagactagcttttattgaaccaaaaagttttgtaatgacattcattctttaatctaatgttaatacttcattaaaaaaaaaaaaaaaa

SEQ ID NO: 383 - DNA, 369 bp, Arabidopsis thaliana
agcggccgcccgggcaggtacaaatggttgatgattttgtgtttgtgttttattgtgcatctatggaggtcgttttgtcggtgatcaagacagggcaaattcacctttgtggaacttatccatggcctctttaaactcaggcattgcagattcgcgcagatttaccaaaaccttaaacccactgtctttcttgcttccagctgcagcatcagtagaatatggcaagaaaaaacatggttccatgcttccaagcaacttgtttgatagtggcaaaaccgtcacaggtcctccccatccaaaatcaatcgtggaatgccccaagtatcgccagtccgtgaatccggtcactcctgtacctcggccgcgacc

SEQ ID NO: 384 - DNA, 369 bp, Arabidopsis thaliana
ttttttttaataaaaaatatttaaaattataatacttatataatcatatgataataataagactgtacatagtaccgtgagagctctttgtaaaacatttgagagccgaagtagacatttaacagattcagataacacaaacataagaggaagataataacatttgaagaagcatacgtaggtagagttcttataaccaagttcaaggttttatctaatagccttaccggagaatcattgccggtaaggatcaaactggtgttgggactggtgttgggacattagatatcggcggctgcggtgctacagcaaagtgcagtcctctgcgttgaggcccaccaccgtgtatcatgaaagtaacttctgcgg

SEQ ID NO: 385 - DNA, 369 bp, Arabidopsis thaliana
  misc_feature (1)...(369): n = A,T,C or G
tttttttttttaacgaatgtcactgtatttgattttatttgagacaaaaagagtccctcctctctatggatttgatggtacaacaaagactttgatttacaacagaataagaagaagaaactcattnnngggggtcccttcaggtgtaataaagagatgttgttaaacagtgactggcgttgcttcatcaagagcgacgacaccgggaagcactttgccttccaagagctccaaactggcaccaccacctgtggagatgtgactcatgactcctgctactcccactttctccactgctgccaccgagtctcctcctcctattatcgttgtcactccctttttgcttagctctgctagtttattcgctac

SEQ ID NO: 386 - DNA, 369 bp, Arabidopsis thaliana
gcggccgccctgaacgatcaaagagtgcaaaatatgaaagttatacaggagaagatgcagctcaaccagaaagaagttaaacgcttcaatccgatagatgcatttcctggtgatattgttatttttgcgagggtcattaatttactcagaggactttcatctactatgaatgttcggattgtttatctggacatcatgagaccatttgccgaatctgttctgttagggagtattagtcgaggaccaactgtggatgctcattggatacatgactcgccaatccattctgatgtagagtccaaagtgaggaagctgctcgctgaacttgggagtatccagaaaatacttggaattcaggtgtgtgcatat

SEQ ID NO: 387 - DNA, 369 bp, Arabidopsis thaliana
  misc_feature (1)...(369): n = A,T,C or G
tggatcctctagagcggccgccctttttttttttttttttaaacaaagttatatatatttccatcaaatactttatatacaacgacgaattcatttgcttacacatttatacatnnaatcaaatataatttcaagacaagtagaagaaacagtagtaccaaaccataatttaaagcgatggaaaaatattttgcatgtcttctacttatctttgtaagatgagtgctgctccaaccaaaccaaaccacagtgtcaaagcaagccaaaagactcggttcttctccataccgaccaccggtcgccaaaccaagagctttcctagaaaatcatcactcgagttgagctgattcgtagtcgatgcattcattc

SEQ ID NO: 388 - DNA, 369 bp, Arabidopsis thaliana
ttaccacggcttttgcaatgtgggatgcagacttctacgtcaaagtcgatgatgatgtgcatgtaaatatagccacgcttggagcagaattagcaagataccggatgaagccccgagtgtacattggttgcatgaaatctggacctgttcttgctcagaaaggagtgagatatcatgaacccgaatactggaaatttggagaagagggtaacaaatacttccgccatgccacaggtcagctctatgcaatatccagggagttggcgtcttacatatcgataaaccaaaacgtacttcacaaatatgtgaatgaagatgtctctttaggatcatggtttcttggattagatgtggagcatgtagatgacc

SEQ ID NO: 389 - DNA, 369 bp, Arabidopsis thaliana
cggaacacggctactacatgccggcggaatgggattctcatgctcaaacttggatcggttggcctgaacggcaagataactggcggcacaacgctttacccgcacaacgagtgtttgcagatgttgcaaaggccatctcaaagttcgagcctgtcactgtctgtgctagccctgctcagtgggaaaatgcaaggaaacagcttccagaggatataagagttgttgagatgagcatgaatgattcttggttccgcgactctggaccaactttcattgtacggaaaagaccagtaaagctcagttctcttaaccgaaacattgctgggatcgactggaatttcaatgcctggggaggagctaatgatggct

SEQ ID NO: 390 - DNA, 369 bp, Arabidopsis thaliana
  misc_feature (1)...(369): n = A,T,C or G
ccacactaaaccattccgtctgttccgtaacggagctctaccgttaaagatgacagagaaaacaaaagcggtttacgagtcactcagcagaagaaaactcgccgacggtgacagtaacggtgatggagacgacggaagcatggttctgataagcgatatcgttaccgtgagccaagacggaacaggaaatttcaccaacatcacggcagctgtagcgnnngcgccgaacaacaccgacggaagcgccggtttctttttgatctatgtgacggcgggaatctacgaagagtatatctcaatcgcgaagaacaaaaggtacatgatgatgataggtgacgggattaatcagacggtggtcaccggaaatag

SEQ ID NO: 391 - DNA, 369 bp, Arabidopsis thaliana
tatacaagccaagcgctcagcaatggcgatcacacgctcctccttggccatttgcctcatcctctctttggttaccataaccaccgccgattactactctccctcatctcctccggtttacaaatcaccggaacacaaacccacgctcccgtctccggtttacactccacccgtttacaagcctaccctctcccctccagtctacactaagccaactatcccacctccggtttacaccccaccggtttacaagcatacaccctcacctccggtttacactaagccaactatcccacccccagtgtacaccccacccgtttacaagccaactctctcacctccggtttacactaaacccactatcccacc

SEQ ID NO: 392 - DNA, 369 bp, Arabidopsis thaliana
gactgcctgaatatcgctttgcagagtgctgttcatcacttggaagagattcgcatgaaagcaatccgcctggtggcaaacaaactctattctttatcattcattacagaacagattgaggaatttgcaaaggataggctattttctgtcgtaagtgatgattgtgataagatggatcttgatctgaaaagtccaccaaacaaaccgcaacacagtattagtggtatgagtatggagacgccctccgaagcaacatcatcatcaacttcagttactgaagctcaacgctgcttgtcactctattttgctctctgtaccaagaagcactccctttttgttcatgtattcagcatatacaagaatgcatca

SEQ ID NO: 393 - DNA, 368 bp, Arabidopsis thaliana
  misc_feature (1)...(368): n = A,T,C or G
tttcatataaagctttattcaaagccaattataagagagaaactcaacacttcccaaaacgagatacttcttcttctttgtttgtgatgaaacaaaaaaaacactttgcaaactaaatcccgtannnnntacacatactacaatggttaatatccatcctatcacattggcccagattcaagataacggcttatgaaagtttaacgcatgtttctgttaaggagaccttggaaagataaataaagatctttgttctcttccccaaatatctcatctgctttcctcagagtttcctctcgggtttgcttctgggcgttgagctctttgatgttagctaagaaggaactgaattgttcataggataatcg

SEQ ID NO: 394 - DNA, 368 bp, Arabidopsis thaliana
  misc_feature (1)...(368): n = A,T,C or G
aattattactaaaacatcttaatagctcattatctttcttgcctctcaatgttttagacaagcttgcatcagctgttcatcaaagaatattgtgtgtgtaatgactcattgttcttaatcttagagtcgaggcatgaccaattgaaaggaggaatcgcatatggccctgttagtacgccctcggatatnnatttgtatgcagcctcagtcatatgaatgccgtcccaattcacatacttcgaaggatcactacaatattcaactcctttactcccacattttatactaaaggtgaagttgtatggtcctcctaacccgcaacaagcgggcaaaggtctgtccatgagcccgaatttggatggttcttg

SEQ ID NO: 395 - DNA, 368 bp, Arabidopsis thaliana
gcggccgcgttctccagatcttttctcaagaaaatttaaagctttaacttaagaaagcttgaacctttctcttccaaccacatcttccttctttttatcctctagctcaacttagaaagaatagaataaagtggcaaaaccgaaagtgaaccaacttgtagtaaattaatagttatgggttcgaaacctaatgccatgaagaatgtggtggctatggcggcagtttctgctctgttccttctagggtttcttgtttgctctgtttctggttctgtctcttacgatagcagagccattaccatcaatggcaaaagaagaatccttatctctggatctattcactaccccagaagtactcctgagatgtg

SEQ ID NO: 396 - DNA, 368 bp, Arabidopsis thaliana
  misc_feature (1)...(368): n = A,T,C or G
aacgatcggggaaattcgagctcggtaccctgttgggtgtgaaatttctgatgatttgtctgattgtgggcttatacttggaatcaaacaacctgagctagaaatgattctnnnngagagcatacgctttcttttcacatactcataaggcacagaaagagaacatgcctttgttggataaaattctttctgagagagtgactttgtgtgattatgagctcattgttggggatcatgggaaacgattattggcgtttggtaaatatgcaggcagagctggtcttgttgacttcttacacggacttggacagcgatatctaagtctaggatactcaacacctttcctctcgctcggtgcatcgtatatg

SEQ ID NO: 397 - DNA, 368 bp, Arabidopsis thaliana
  misc_feature (1)...(368): n = A,T,C or G
gcggccgcgctgtcggcatgttctcctccactccgccgcactcgtcgtgccggttttcgaacaagctgctcgatcttcgcgaatccagcacagcgagccaagaggaagctgcttgagctgatctccgaggaggatcgaggtctgagaacccagaaagaccccaagaagcgagatgaaatcgtgaacgccatcgaatccatgacggttatcgggcgnnntccatcaccacagacgactctctatctgccacgtggcggctcttgtggacgacggagaaggaacagttgttcatcatagaaaaggcaggcttgtttgggacgaccgccggagacgttttgcaggtgatcgatgtgaataaacggatcctc

SEQ ID NO: 398 - DNA, 368 bp, Arabidopsis thaliana
gcggccgcaaaaagaaggtcctgcgcataatatagaagatgactggctggagactgaaaaaaaggtcatagtcattcacagacttcatcaaattttagagccattcatgctcagacgccgtgttgaggatgtggaagggtcacttcctgctaaggtttctgtagtcttacgatgtagaatgtctgctattcagagtgccgtttatgattggattaaagcgactggaactcttagagttgatccagacgatgaaaaacttagggctcaaaagaatccgatataccaagccaagatatatagaactttaaataataggtgcatggagttgaggaaagcctgcaatcatcctttgctcaattatccatatt

SEQ ID NO: 399 - DNA, 368 bp, Arabidopsis thaliana
  misc_feature (1)...(368): n = A,T,C or G
cgatccggagatctacgacctaatcgagaaggagaaacatcgtcaatgtcgaggaatcgaactcatagcagccgagaatttcacttccgtggccgtcatggaagctctcggaagttgcttaaccaacaaatactcggaaggtatgcctggtaatcgttactacggaggtaccgagttcatcgatgagatagagagtctctnnngctcacgctctctcgaagccttccattgcaatccagagaaatggggcgttaacgttcagccttactctggttcccctgcgaatttcgcagcctacaccgccttgctccagcctcatgatcgtatcatggggcttgatttgccatcaggtggtcatataacgcatg

SEQ ID NO: 400 - DNA, 368 bp, Arabidopsis thaliana
  misc_feature (1)...(368): n = A,T,C or G
atgcataaaaacggttatttccatcgagacctgaaacctgagaatttgctggtgaccaacaatatcctgaaaattgctgactttgggttggctagagaagttgcatctatgcctccttacactgaatatgtgtccacacgttggtatcgagctncagaagttttgctacagtcttcattatacactcctgcagttgacatgtgggcagttggagcgatactagctgagctttacgctttaactccgttatttcctggtgaaagtgagatagatcaattatacaaaatctgctgtgttcttggcaagccggactggaccacgttccctgaagcgaaaagcatatctcgaattatgagtattagtcacac

SEQ ID NO: 401 - DNA, 368 bp, Arabidopsis thaliana
ccaactcgagaaaagcgatccaacaatgcatgaaaccaaatgtcacaattgttctcacacattccgaaaaaatcaatctacaatctgaaagctttcaggcaactgtgggttgcattcagagactgagagataagtttcaggctttagtggaattttatccgactgtattcacagttgatgcaagatcatctccttcggttagtaaactcacacatcatattcggatgactagcaaagccatccttcaaagagttcctcgggtttatcagctctgcaatgatatagtacagctcttatcagactggagatcagagaattcgaacaaacctattatgagatggaaagcctttgcagacctctgccagttt

SEQ ID NO: 402 - DNA, 367 bp, Arabidopsis thaliana
tcgacggccgcccgggcaggtcggtatgcttcacgccataaaaatccacaacggtaaagccactctctgtagcagatacgtcaagacttataaatacaacgtcgagaaacaaaccggagccccggttatgcctaacgtgttttccggattcaacggtgtaacggcgtcagtagctcgtggagctttaacggcagctagggttttaaccggacagtataatccggttaacggcattggtttagctaatacgagtctagctctcttcagtaaccgtctctttgctttaggtgaatctgatttaccctacgccgtccgattgaccgaatccggagatattgaaacgatcggacggtacctcggccgcgac

SEQ ID NO: 403 - DNA, 367 bp, Arabidopsis thaliana
ggccgcccgggcaggtacatggtgatttgaagccggcaaatatcctactcgattccaatctcgttagcaagttaagtgactttgggacctgctcactacttcatcctaacggaagcaaaagtgtgagaactgacgttacaggcacagttgcctatttggatccagaagcttccagtagtggagagctaactcctaagtcagatgtttactcgtttgggattatcttattgcgcttgttgaccgggagacctgccttacggatatcaaatgaagtgaaatatgccctcgataatggaacattgaacgacctcttggaccctttagcaggggactggccctttgttcaggctgagcagcttgctcgctt

SEQ ID NO: 404 - DNA, 367 bp, Arabidopsis thaliana
tcgagcggccgcccgggcaggtacaaattctattcttgttagcatttgatcagccaacatcaagactgtctttggtgagaattttctcccacagtagacgaaaagatcttcgagacttggaccgagcaaatccatcactaaagcattctctgttccatcaactccaaaccattttatgcgcggaattccacttcctccttcaagaattctatatagcttagcttcatagagaagttgaggatgctttgttttactgttctcgatcttaacagctacgatctcgaaggtatcgacgtgcgtagctagaaaaatctctccgaacgaaccaccgccgatcttccggccgagcttgtacctcggccgcgcc

SEQ ID NO: 405 - DNA, 367 bp, Arabidopsis thaliana
gcttatcgctaatttgacagaacactagaacagttctctctttttgtcgacagtcttcttcttcttcttcttcttcgattggatctggaactgaactcaaattgggaagaattttgacatggaggaggaccggtgttcgatcaaggatgatgcaactcaattgataggtaacaccccaatggtatatctgaacaacattgtggatggttgtgtagctcgtattgcagctaagcttgaaatgatggagccttgctctagtgtcaaggagcgaattgcttatggtatgattaaagatgcagaagacaagggattgattactcctgggaagagcacactgattgaggctacctctggtaacaccgggatt

SEQ ID NO: 406 - DNA, 367 bp, Arabidopsis thaliana
ccacgcgtccgtgatcttttaatgctcttttgtccttggagaagaatcatacatgcatataccgttacttctgatgatgattcagattacaagaatcttctaacatcttcttagaaaagcttctttcctgcaattagtggtttttatggttaaaatctgggaacttcaagaggcatgaatagatgtgcagaagttttcggttgatattgtcactcgctataggtttattgaggagctcctttaagctaagtagtccacatagggttatctacagggggataaagcctgaaaatgtgtgtggttttagggggaatttcagaaattttaacagtaaataggatttatgatgggttatcaaagtgggggt

SEQ ID NO: 407 - DNA, 367 bp, Arabidopsis thaliana
cgaagagattgcgaaaagagagagcagatttgcaagagaggtctctatgttgtctagagttcaacacaaaaatttggtcaagttcattggagcttgcaaagaaccaatcatggttatagtcaccgagcttttactcggtggtacattgcgtaaataccttgttagcttgcgtccagggagtttggacatacgtgtagctgttggatatgcccttgacattgctcgggcgatggaatgcttacactctcatggagtcatccatcgcgatctcaaaccagagagcttgatcttaactgcggattacaagactgttaaactagcagattttggtttagctagagaagaatcattaaccgagatgatgacc

SEQ ID NO: 408 - DNA, 367 bp, Arabidopsis thaliana
tttttttttttgtagaaatttatagcaatttactttatcaatcctcccaaatcactttatcaaagtaatggggtcaaatgttaaaaattgaaaagttatggagtgaaacttaaattacataaatgctcttccaaggggaagaagactaagagtatagaatctctctaaccagaggttctatcaccaccaaaacctgattgtaagaagccggtttcctccagatgactcacatcaccccaaacttggatggtccatttgtctccgtcgaataaacggaacacattgaccgatgtattgagtatcttttcaacttttcttgcacttggacgagctctttcgtagagagatcggatcacacctccatgag

SEQ ID NO: 409 - DNA, 367 bp, Arabidopsis thaliana
ctttttttttttttttcaaccaaaaaacataatcatatttttttaagcaactttaaaaacaaaaatactcatgagtattcatctagtgtatacaaaaggctactacagtagttataatcatattcaaacaagtgactgaaacatataataataaactctcaagacaaagacttttttttttttaatctgccaatacctcctcggataggtctcctctcagcaatctcccaagctatgtgcctacgaattagcttcctcaatcgccatatctcaaaatgcaagtatcctcagcatggcagctcttactacctaaataacaataagaggccaatcttagtttctatcaccagtgaatccatgaccaccg

SEQ ID NO: 410 - DNA, 367 bp, Arabidopsis thaliana
cctcgtgagtgcggcacgcacctttttgtttgtttcggagccgttttggcagggcgtactaaacccacttacttcgtcccacaccaccgggcggctcgcctgaatgccgagtctttctccgccgccaactcgacgtcgtcgtcacctgggtcaaaaacttgactttactaaacaagcgagaaaagccctttcgcacttcttagtaaagcgcggcgctagctgcaatcaaactcaagcgcagactagaaagggcttggaaaggcgccgtctcccttcttactgagagcagagctagttgctgtcactcaattactaggtctggcacgtcactcggctccttggctcacttcggttttcaagcctttct

SEQ ID NO: 411 - DNA, 367 bp, Arabidopsis thaliana
  misc_feature (1)...(367): n = A,T,C or G
gcggccgcggcctctctgatctggagaaatgggctacggaatttcctgaccaccttgatgctttattagctgaaagaagggtggatgaagctctggcagcttttgatgagggagaaattttagtatctcaagcaaacgaaaagcatactttaagctcttctgtactttcatctcttcagtttgctattgccgaacgcaagnnnaaattagctgaccaacttgccaaggctgcttgtcaaccttcaactcgaggtggggaacttcggtcagccatagcagctctcaaaaggcttggcgatggtcctcgagcccatactgtacttcttgatgcccatttccagagatatcaatacaacatgcaaagtct

SEQ ID NO: 412 - DNA, 367 bp, Arabidopsis thaliana
gcggccgcgtaaaaccttttttctgaagtatacgccactacaaaaaaactgttgtataaataaaaatccacaaaaaaggcagaagaatatctagctctctctctcaatctgtctgtctctgctctctctatcttccattgaatatagaactttctatcaagcacataagaacttgaagaataattataaagtttccaaccgaaagtatgtacaaaggaagaagattgtctttccttttcttctgctttgctccagaggagactagagagacctatcagttcagtttgtgttggatttgacggtgaactgaaacgagaaaatccacgtacgaagccccacccgatcccctgtcctctaccatatacga

SEQ ID NO: 413 - DNA, 367 bp, Arabidopsis thaliana
tagagcggccgcccttttttttttttttttttttttttttttttgagccaattttcttcaaccattacttaaacattaaccagaatttgaaacacaatgacactattcctacaaatacatcaaacaagattgagacttgagaccgtggaagaagaatgaaagacctgtcctctctagtgagctatcaagtgtagagaggtaaagcagtccaagcaccagagacatgaccattctcacaaacataagctctcacaactggttcaccatcatcatgaaacccaaacactcttctcaaacaaaacgatgaatgcaaatcccaagtctcatcgcacaaacaaaacgcgcatttcaaacccgaggtcttact

SEQ ID NO: 414 - DNA, 367 bp, Arabidopsis thaliana
  misc_feature (1)...(367): n = A,T,C or G
aattttcacatattactgaaggaaaaacgaacaattcacacaggatgattcacagattaatnnctgagtttgtcgaagcttaaagaattcaacaaatacagataacaaagctttggtagaatcaaatgacccagaaccaagcaatgacagatccagaggccaaaccaacaaccaagaacatcacagtgacgattcctgcagtctccgagtgtctcagtggaaccgattttggagccagaatcatcaagacgcttgtcaagtacccgttggtaagtcccaataagcatgtcagtatagttacaggaatctcagtcctgagaaacatcggaccgtgcaagcaaccccagaagagagggtaaaacaagag

SEQ ID NO: 415 - DNA, 367 bp, Arabidopsis thaliana
aatttcaaaaatcaatggcggaagaaattgaaaaatctgtgccgacagaggaatctctgatggagaagatctccgagaagattcaccatcacgattcgtcgtcatcgtctgaatccgagtacgagaaacctgattctccttcggctgtgaaggcgaagatctatcgtatgtttggcagagagaagcctgttcacaaggttctcggtggtggaaagcctgctgatgtgttcttgtggagggataaaaaactatcaggtgctgttcttggtgtcgcgactgctatttgggttctgttcgagctggttgagtatcatttgttgagtcttttgtgtcacatttcgatactcgctcttggaggcctcttttt

SEQ ID NO: 416 - DNA, 367 bp, Arabidopsis thaliana
  misc_feature (1)...(367): n = A,T,C or G
agtcgagaaaggtagggccgtaaaattcacgcatccaacccgagaacaagcagatgtgtttctcaattgcacgtacaacattgctaaaccctttgactctagcgacctcaagtggtgtctgacaatcatcattaagaacaagtggattcgcaccgtgagaaagaagtaacttaacagtgttctcaagacctctttttgcagcatggtgcannggagtcccagcatgacgaccaggacgataagcattaacattagnacccaactcaatcaaagtcttagcaacatcaaatngctcggagttcatacaagccaagatcaacggagtttttccttctctatccatccactcaaggtctccaccatctcg

SEQ ID NO: 417 - DNA, 366 bp, Arabidopsis thaliana
aaaataatttcattaaaaataataataatagtcacggttaatgtacaagcttggctttagtattgtatccgtaataagaaagataccatctaacgaacttcttcaacccggtttccaaatcggttgtcggtttatacccgaattcatttcgggctgagctaatattggcatgtgtgaacggtacgtcgccgtttcctggcatctccacgaagttcctcttcgctttcacctttaaatgcttctccaatatatccaccagaatcggtactgtaaccggagatgtgtttcccaggttaaatatccggtacggtgctgctccacgttttttaccacccgacccggtacttttacccgatgaatccagag

SEQ ID NO: 418 - DNA, 366 bp, Arabidopsis thaliana
cattttcttgtttgtgcgttgtaatgaggctacacatggtgggcatgtcgaaatggcatggcaattgtgaagcaatttctacatgtcatgtctcattggatgcttcagcagccatgttgcgttagatgctttcatgtctgcgacatgtcggcttttgtatacatgtacatgtccatgctggttgcgccgttgttgagatcgaacattgtctcaattcttgaacttcaccgatgatttgtccattagtaccacagcaatgtcttcgacagccatctctctctcttccattcaattcacattaccctctacaacatcttttctccatacgtaatacgttggtcattcgatgtgtctgatggcaggttt

SEQ ID NO: 419 - DNA, 366 bp, Arabidopsis thaliana
gagaaccagcacttgctaaagactatgaactgccgtttcgggtggggaggtttttcagatgggtcaaatgggtgggcatttgataaaacaacaacacaatggcaaaaagtggtaaatatgtcagatgagagatccctctttttcttttctttttcccgtcgtctctgttattttgattagtagtctctcaattttataacacggtggaagctttttcttgggtcacaagtttgtcaattggagagtttttggttattgaaacagagaatatggaagtcatgttgttgtaagttatatagattatgatcaaatgcttttgtaactagagttattcttttttctcactatctatcttattccttgttt

SEQ ID NO: 420 - DNA, 366 bp, Arabidopsis thaliana
ctttttttttttttttttttttctcataagtgttgcactttatttaaaaccttatgttgtaaagatacaactgtggaaccttccacttacaaatcttgacacatattaaaccttacaacattggatcaactaaaatatagtcatccatattgcataaaaaaccaacaagtccaacttataagcagaggcccataaagaaagcccaaaccaggaaacaaaacctttatgaggaagtaaattaaagattcccttccaccacaaagccacgtgtgatgttaacaaacaaagttgaaacacgttgactgaagaagccttagttgtcgccattcaccaccgttctggttagcaactcagggaactctaaaa

SEQ ID NO: 421 - DNA, 366 bp, Arabidopsis thaliana
  misc_feature (1)...(366): n = A,T,C or G
aactgtatattgttgttcttcgattcctcctcgctctacgccgcgtcctctctctcaaattcatcnnnnnaccttcttctcccatcatcgcctgaatccaatggcaacgataaggaacttgaagataaaaacatcaacatgtaaaaggattgtgaaagagcttcactcttatgagaaagaagttgagagagaagcggctaagactgctgatatgaaggacaaaggtgctgatccctacgaccttaaacaacaggaaaatgtgttgggtgagtctaggatgatgattccggattgccacaaacgtctcgagtctgcattggctgacctcaagtccactttggcggaattggaagagacggatgagaa

SEQ ID NO: 422 - DNA, 366 bp, Arabidopsis thaliana
ctctagagcggccgccctttttttttttttttttttttttgttgatagcaataagataaaagactccaatggttcatgcgaaactgcaacaactgtccctccagacaaaattcaattcagagtacataagaaacatcaaacgacgcaataagacggatctaaattcaacacactcctcagttttagtcagcatccatctcctcgagcgcagttttagctgccgtctttgcttcttccagaagatcatcagggaccttctgatgctctcgttttgactcctcgcatatccagctcatctccaattcaaaagccttgtccttggcttcatcgtgtagcttgtagatgattttcgccacctcgataacg

SEQ ID NO: 423 - DNA, 366 bp, Arabidopsis thaliana
ggccgcagaagatgaagcactacagtcacggaattgatggtttacgaagcggtctttcaccttccgctaaacctttcgcaatcggttcttcttcttctcctgccttctctctcaaatctgaacacgaagattctatttggggtgattatactttagacctttcctttttatcctctgatgatcagagaagtggtctcgatgatgatgattcgttatctaacttgtctcgcgatgttgagactaataaagaaggattggttttagaggagaagatagctagttctggaaaggttttggtaaaccctaatccaagtttctcgaaattgcctgaggtattgatgaagtcctcagatgttgttggtgatg

SEQ ID NO: 424 - DNA, 366 bp, Arabidopsis thaliana
gcggccgccaacgatgctgatatgaggtctcccgtggtgacttcaaagagacaagttcaacacaatagaaaacaaaaatactacaaatccaaataaaactcgaaactgttatatctatacagccttcattatgatgtcacaagaactgaaagcttcagttttagagctctttcggaatagttacaacctctctctctcgaggaatttggtcgtgtgtcaaacgatcaaaagtattgcaggacagcgatcatatcttcacacgacattatgaaaaaatattctctgccaaaagaaaagcttcttcttcacagacacaatgttctccttatcagggggctccaatgccgtaaatacaatcttttttgc

SEQ ID NO: 425 - DNA, 366 bp, Arabidopsis thaliana
gcggccgcgaaacctcagattggtcatcaatatcagacatagatacaacgaaagaacttgaatcttcaaaatctcctgtgccagaatcaacagatgggtcaaaagatgaactaaacatatatagtcaagatgagcttgacgacaacagaatgcttttggaaatacccagtggtggaagtgcattttcttctgctggaattcctgcaccttttatgtctgttatagttaatcctgggaagattcttgtccccgtagctgcggatcagatccagtgtcaagcatttgcagctctgcaagttctgaaggtcattgaaactgatacacaacctagtgatctatgtactcgcagagaatatgccaggtggc

SEQ ID NO: 426 - DNA, 366 bp, Arabidopsis thaliana
tttttttttaaagatttgaacaaatctataataacataacatattacagtgtgttattaacacattttcgtgtagacaagtaacagatatgtctatctatacagacttatttttgagacttgtacacacaacatttgaagatccctcatgtatgttaggttgtagtaatcgtcactctatatacatcttccgcatcctatacatcctcttcctttctaaacatctctctactacttccccatatggttcacatcacccagtaccttgctcagtttctgcgatttcattcatagtcttgaacggaaaaagcgtttcttaaaaccaagatttgagttcttacgggaggaggacgtggcatatggttga

SEQ ID NO: 427 - DNA, 366 bp, Arabidopsis thaliana
  misc_feature (1)...(366): n = A,T,C or G
ttttttttttttttttttttttttttttttttttttttttttgatgttcaaaataactttttcttcacgtcatgcaaatgaatagaatagacaacaaacatacattgccaaatgccaagaacgttcaaattacgctacaaataccaataagaattcacaaaaacgtcttttttcatttcaaagaagccaattaacactaatgttaccaagccatatcaaaannnggaactggaccaaggctaaaaacagaagaaggtagtgatgtttgctcgaatcgtaacttcttacttcagcaaacagaacacgtttcatcgtcttcaccaagaaaatcccagtgcatagacaagtccatggcatcaacgcgta

SEQ ID NO: 428 - DNA, 366 bp, Arabidopsis thaliana
tttttttttttttttttttaaagaagatgtaattaagatgagagaactttgcgacagtaattatctgtgaaccacatttctcgagttgtatcacaatttcaactacagaacaatctctcagatagacaaacaaaccaaacaaaactcgtgtccacaactcaagaccttcgacttgctaaaccggagtctcgcagctcccacgccagtttactctctctcgaaacatcggacttgattgctcgaaccaatggcttcatcaccagcaagtattggaatgcaaacattaaaggaatcagtttttttcctctttcgtttgggtttggcccttcgaccagtttcttgtcaacatgaatcgccttgttgcca

SEQ ID NO: 429 - DNA, 366 bp, Arabidopsis thaliana
  misc_feature (1)...(366): n = A,T,C or G
ggtttcgagttttctcaatctcctacctgattaaggttaatttcttatcttggatcaataacaagagaattataactccggattgtaatcaatattcctctacataaaaagcgtgaatgagattatgatggaatcgaaagctggtaataagaagtcaagcagcaatagttccttatgttacgaagcacccctnnnttacagcattgaagacgttcgtcctttcnntggaatcaagaaattcaaatcttctgtctactccaactgcgctaagaggccttcctgagtactagccagttccctccatagcttttcaattacaacaatctccttttctcaaagctctggttccccaaatcctctcgtctt

SEQ ID NO: 430 - DNA, 366 bp, Arabidopsis thaliana
caacaaacgccaaaatccccggcgtttacagtggcggaccgtggcagaatgcacacgccactttctacggtggcagtgacgcctccggcacaatgggcggcgcgtgtgggtacgggaacttgtacagccaaggatacggtgtgaacacggcggcgttgagcactgctttgttcaacaacggattcagctgtggtgcttgttttgagattaagtgtactgatgatccgagatggtgtgttccgggaaatccatctattcttgtgacggcgacgaacttttgtccgccgaattttgctcagccgagtgacgacggagggtggtgcaatccgccgcgcgagcattttgatctcgccatgcctatgttcc

SEQ ID NO: 431 - DNA, 366 bp, Arabidopsis thaliana
tttcattagcgatatgtctaacgttgcttgtcacattaagcactgtttatgaaacacaagggacgttctcattacccctttacttgaaaaatttccccaaactgggcaaagactatgaggctttcgcaaacaaaggtatatcggactttttgggtgacctagagggtatgtgtcctaaaaccgcagagttcaaggatttctttgaaaacttgaaggattacatggccttcttcaattcagcagcacccgggtcaaaagacaaccagttcgagatgttcgtaaaatctgaaaagctgttcaaggctttgtctgctttcaacagtagtaaaggcggaacatcagaggattcgtggaagctggtggatg

SEQ ID NO: 432 - DNA, 366 bp, Arabidopsis thaliana
taaatatacatatatagataagctcacatatatggcgactgaaacatcttctttgaagctcttcggtataaacctacttgaaacgacgtcggttcaaaaccagtcatcggaaccaagacccggatccggatcaggatccgagtcacgtaagtacgagtgtcaatactgttgtagagagtttgctaactctcaagctcttggtggtcaccaaaacgctcacaagaaagagcgtcagcttcttaaacgtgcacagatgttagctactcgtggtttgccacgtcatcataattttcaccctcataccaatccgcttctctccgccttcgcgccgctgcctcacctcctctctcagccgcatcctccgcc

SEQ ID NO: 433 - DNA, 365 bp, Arabidopsis thaliana
ttttttttttaatgaaatgttggttactagaaatagaaattttaaaaaatacttgcgaaaattcaaagagtataccaacgtaaaagaaaaaaagaacaaagatgaaaacacaccatctcttgtttacatttcttatgtgaattgcatagacaacttttttttcctacaagtaacataatattgtataaaaattgcatcaacattgaagttctgaacactctcaatcttcctctctaagattggttttcttgatttaagaaacatggtttcttctcttagaattcgaattcagtttactgtggtcatcgcgttttgcgtatttggatttgctcgaactttcagtcacttgagggatatatggaaaa

SEQ ID NO: 434 - DNA, 365 bp, Arabidopsis thaliana
caacagatttcaaagagcttcagattccaggttacgtactaaaacactttacgtcatcggtttctttagagacatggtcgatgctctttgtccttacatcggtctaccaagttttcttgaccacaacgagacctctcgatccgacccgacccgactcgctctctccacgtcagcaactcttgccaacgagttaatcccggtggttcgtttctccgatcttttaaccgatccggaagattgctgcacggtttgcttatccgattttgtatccgacgataagattagacagctgccgaagtgtggacacgtgtttcatcatcgttgtttagaccgttggatcgttgactgtcataagataacgtgcc

SEQ ID NO: 435 - DNA, 365 bp, Arabidopsis thaliana
agcagtttctatcacctcattgatttccatcaaagctaagcttcccaagcttacgaatatcacagagtttttcttttgtttgttcaaccattcaatacagctcttgttctcttcaagaagactcgtagaagctgatgccaccaggtgaagagggcctataggataaactggaatttgtagctgttgctgcagacgagacagagatgagctctctagacagctcgctgtgttgattatcaccgaggaagctgtccgtttgtcaactgtattcctatacagctccatcatgctttctaatgatgcccaatgtgaaaccggaaagtctttgcatctcaggggatgaaactctggtacctgcccgggcg

SEQ ID NO: 436 - DNA, 365 bp, Arabidopsis thaliana
acggcgacacagccaaagaaactacgcatcaccgagagaaatggcgttaaggcagaagttaggatggtcagaaggagatctgatgagatcagatgctaagccatgttcaagactgatgaaacaaacagctgccattttcactgttggtggagctcttggtttctgggttctttgcagacttcactatggtccaaggatcacagtgccaaggagtctgcggtgggctgggtgtggtgctttgtccgtaagcacatcaactgcaatgcttgtccgtctcttcagccctgaatgtgaaccacaaaacattgctgcgtatgataacatcaaaacccctcaagcttcactcccttaaaccccatcataat

SEQ ID NO: 437 - DNA, 365 bp, Arabidopsis thaliana
ctctttcgttaatctcaaactcaatcatgtctaccccagctgaatcttcagactcgaaatcgaagaaagatttcagtactgctattctcgagaggaagaagtttccgaaccgtctcgtcgtcgatgaggctatcaacgatgataactccgtcgtctctcttcaccctgcaaccatggagaagcttcagctcttccgtggtgataccattctcatcaagggtaagaagaggaaggacactgtctgcattgctcttgctgatgagacatgtgaggagccaaagatcagaatgaataaagtagtcagatctaacttgagggttagactgggagatgttatatctgttcaccaatgcccagacgtcaag

SEQ ID NO: 438 - DNA, 365 bp, Arabidopsis thaliana
  misc_feature (1)...(365): n = A,T,C or G
tccacgtcaagagagggattaatctcgccattcgcgaccatcgtagcagcgatccttacatcgttctcaacgtcnnngatcagacattgnngacacgtgtggtgaaaaagaattgtaacccagtatggaatgaagaaatgactgttgctatcaaagatcctaatgtcccaatccgcttgacagtgtttgattgggacaagttcacaggagatgacaaaatgggagatgcgaacatagacattcaaccatacttagaggctttgaaaatggggatggagcttttgaggctacctaatgggtgtgctatcaaaagggttcaaccatcaaggcacaattgtttatctgatgagagtagcattgtttgg

SEQ ID NO: 439 - DNA, 365 bp, Arabidopsis thaliana
ttattcaacaacaacaacaaaattatcgtaacaataaattttttttgacagtgtgatataaagaaacttataacatagtactttcaatccatctgttttaaaaaaaacactaaaaatgaaaatcattgtgctaagaataaaataacacattcacattacacaaacatatatgaaaacttctaatagacccacttcgttatattagtaatacgatattatagacaagaagaaactcgatcaaacgacgcaaagctcttatataagccttaaaactcgaggaggcgcctcatgacgccaagcagctccaaatgtgatgtcatctgtggaaaatgcccgatcgcgtcctcgatgatctccactgtcga

SEQ ID NO: 440 - DNA, 365 bp, Arabidopsis thaliana
tttttttttagtaataagagatttttatttcatcgatagccaaagaaaaacgttaaaagagaagaagaatctactttacgctgaatatgaaattaacatggattgttgaaagctatttaatcaatcttctggtttttcaaaagggtttcaaaagtcacctctgcattttgtttctttttatcacctgaaccaccatctctgaacggcactgaccggagtattcaagaaaggagcgtaacgttggataatcggagtcaccgtcctccctattctgctccacgtgctctggtggtaaccagctgttaccggtgcttgatacatcagcttcaatagctgccagtacatgaacgtctgtataatgttac

SEQ ID NO: 441 - DNA, 365 bp, Arabidopsis thaliana
gcggccgcgtgaaggttagggcttctgtttccacggcggagaaagcttcggagattgtgcttcaacccattagagaaatctcgggtctcattaagcttcctggctccaagtctctctctaatcgaattctgcttctcgctgctctatctgagggaactactgtagtggacaacttgttgaacagtgatgacatcaattacatgcttgatgcgttgaagatattgggacttaatgtggaaactcacagtgaaaacaatcgtgctgtagttgaaggatgtggcggggtatttccagcttccattgattccaagagtgatatcgaactttacctcggcaatgcaggaacagcaatgcgtccacttacc

SEQ ID NO: 442 - DNA, 365 bp, Arabidopsis thaliana
ttttttttttttttttttatctaaaaaattgagttacttttattttgcaataataagcatgaatttttgtttattactccattatgacatacagtaaaaaaaaaaatctgtgtttgaagttttgaacaagtaaagagtgttgttacagtttcctctgccaaataccctttgaaactaatcaatcctttcaagattaaacattaccatatcctcaagagccgatctgaaaccactcctaggaagacaattcaaattctttaacgcaagttcagctttctcctttgctaattcttgagctttcttgatcccaccgcgatttctaactatttcaatcgcttcttcaagcgatcggacgcgtgggtcga

SEQ ID NO: 443 - DNA, 365 bp, Arabidopsis thaliana
tcaagtctgatctgcttcaagatccttcctttgaattcacccacgaatctcgtcaatggcttgaacggatgcttgactacaatgtacgcggagggaagctaaatcgtggtctctctgtggttgatagctacaagctgttgaagcaaggtcaagacttgacggagaaagagactttcctctcatgtgctcttggttggtgcattgaatggcttcaagcttatttccttgtgcttgatgacatcatggacaactctgtcacacgccgtggccagccttgttggtttagaaagccaaaggttggtatgattgccattaacgatgggattctacttcgcaatcatatccacaggattctcaaaaagcac

SEQ ID NO: 444 - DNA, 365 bp, Arabidopsis thaliana
  misc_feature (1)...(365): n = A,T,C or G
gccaattgggccctgcagggagcgctggccaacgattgaacaatggattatcacgtgatgtcattggcttaataagccgcttaagtgagccatctagttggctaagggcactttgacgaagcttatgttaaagcataagtccacgcagttcggcttaactctgcagcatnntgaacagatccgtatttagaagagtgtggctcatcggcttacgtggcngtccagagggtggcttggtgggcttaggtgtggccgccaccaaaataacggtggccgcagcaaccgcactccgtgagagcgcggcaccgacaaccccatcgactagacaccactcaccaccaccggctcccccaaattgcgccgcc

SEQ ID NO: 445 - DNA, 365 bp, Arabidopsis thaliana
ctttttcacttaccggagaaatggagagatcgacgccggaacatgtctcctccgcacacaagcgcataagcgtgagcttcctcgtgtctctcatggtactttgtgctagacacgcaagcagagtttccaagaagcttaaacccaagaagactcggaagcaaactcatcttgaagactatctcgaaagccctaagtctaacggaaacggtagcgaagacggtagaggaggaggaaggtttggatggagtccggcaaggactttttctcctatgagggtgcgtcctaaggagctctacacgaccttgagcaacaaggcgatgactatggttggccggaaaaacaaagcttacgacggtggtccgacg

SEQ ID NO: 446 - DNA, 364 bp, Arabidopsis thaliana
  misc_feature (1)...(364): n = A,T,C or G
ttttttttttttttaaagaacaataaggtaaagtattacaataatatgggatttcagttcaccagtccatgctgctaatgttttatctaaacctaaacacaataccaaaaacaaagaaagagagagagagagagagatggaactagtttcaccttctgtgatacaaatggtctttttctttttgttttgtttacacacatttcttgtttctcaaaacccaagggtgcatttcttcttccttgtttccttcacggcttgtgtagcttgaacccaaacactctttgagtgtagctttgtgatgnnttttgtggcttcagatgcccgtacgtcatcaagaacagatgtggaaacgttgtcccaaagt

SEQ ID NO: 447 - DNA, 364 bp, Arabidopsis thaliana
tgtctaatcatatggcccatatgattgattattatcatataatatgatgaatatttcccccattaattctcttacatcacattacccaaaaaaactactagcttagttggtgcatatagactaaatatagattcttgaaacatgaattggttcatctgaccacttaaagaaaacgaaaattttaatacaaacaagaacagatcgaccacattcaattgtattgttgctggtcaagccatggccagaacccagactggtcatcaattccacagaacatgttactgatactgttctcttctttcaccattctctgttctgacgatgaattctgaaaaaactgcatcgttgtagttgtcggtggatg

SEQ ID NO: 448 - DNA, 364 bp, Arabidopsis thaliana
gtgttgttttggctaagattgatgcgacggaggagaatgagttagctcaggagtatcgtgttcagggctttccgacgcttcttttcttcgttgatggtgagcacaagccttacactggaggaaggactaaagaaacaattgtgacatgggtgaagaagaagattggtcctggtgtgtataatctaactacattagatgatgctgagaaagtgttgacttctgggaacaaagttgttttgggatacttgaactccttggtgggtgttgagcacgatcagcttaatgctgcttccaaagctgaagacgatgtgaacttttatcaaacagtgaatcctgatgttgcaaagatgtttcaccttgatcc

SEQ ID NO: 449 - DNA, 364 bp, Arabidopsis thaliana
tttttttttttttttttttgacacgaactgaaatgccagaaagtggcagtctttcattgcactaagattggtgaaccaaatgattattctttaaacgttcatttcttcgaactccaattttgtaagaaaacaaactcagtatacggaaaaaaaatcaagtgttcacagcttgcagtacttgttgaaccagacagcaatgttgagaaagctttcataatccgtctgtggtctatctaagggatgattgtcattgggaaatacaagaactttaacctcaactcctttctccttcaacgccctcacgtattgaaatccgtttgatatgggaacacggagatccttagttcccaaaagaaacaaagta

SEQ ID NO: 450 - DNA, 364 bp, Arabidopsis thaliana
ttcttcttcttcctcgcagatcgattttttttgaagctaaatctcaaaaatggagaacgacgcaggcaggtcacagagctctacattccaaggaaatgctcggcaacaaacagaatgatcacatcaaaggatcatgcttcagttcagcttaacattggtcatcttgatgctaatggtctctacactggccaattcaccacttttgctctctgcggatttgtccgtgctcagggagacgcagacagtggcgtggacaggctctggcagaagaagaaggtcgaagctaaacaacagtgagagacaatctgacaatgtcataagctcttgtttgttttttgaggtttcgatttattagctatgtggc

SEQ ID NO: 451 - DNA, 364 bp, Arabidopsis thaliana
  misc_feature (1)...(364): n = A,T,C or G
ctttttttttttttttttttttttttttttaagttcaaatcttccttttgaagttttgtatagagaacataaatatttggtaaagtgacactgaataaatacaatatttctttattttgttgttcatgaaaagatttgtagattgacacacgagactacccattggtttgttgcggtttaggttcaaactccaaagatgaataggttttccattagacctccaagaagcagccagcttgaacatgaccaccgtgtgtttccaattttacccatcgtgagnnncttaaatcacatatataccctacggtggcttcaccgtatccagccaacgccttcccgttgccgatcacaatcagcatcccgg

SEQ ID NO: 452 - DNA, 364 bp, Arabidopsis thaliana
gcggccgcaagcagattcgtttggaaaagacattagcagtggatattgcatgtcaccaactgcgaagggaatggattcacagatgacttcaagtttatatgattcactgaagcagcagaggacaccgggaagtatcgattcgttgtatggattacaaagaggttcgtcaccgtcaccgttggtcaaccgtatgcagatgttgggtgcatatggtaacaccactaataataataatgcttacgaattgagtgagagaagatactctagcctgcgtgctccatcatcttcagagggttgggaacaccaacaaccagctacagttcacggataccagatgaagtcatatgtagacaatttggcaaaa

SEQ ID NO: 453 - DNA, 364 bp, Arabidopsis thaliana
  misc_feature (1)...(364): n = A,T,C or G
gcggccgcctgacgagttctcaatagtaacctctccggcgcttatcgtgaaaaaccctatgttccagacttctcttacgctttccttgcaaaatctgcctcaatttnnnnntgaagacaagagcttgaggctttttctccaatcttaattgaaactttggggtttttctcacggggattttgcgaattagggtttcggattggggattttgttacatcgaaaggactttggagattcagcgttgggctcggtaattgaagaatgcagaattcataaacaccgctctggaattttactttttaggataacaaaggagggtcattttatctgttaattgatgggtgaagagatatctagcactgtg

SEQ ID NO: 454 - DNA, 364 bp, Arabidopsis thaliana
gcggccgctagctttctctctttctcttcttctagctttaatcctctgtttctcacccacccaatcctacaaaaccatcggcaaaggctaccgtttggtctccatcgaagaatctcccgacggtggtttcattggttatctccaagtcaaacaaaagaacaaaatctacggctctgatatcaccactcttcgtctcttcgtcaagcacgaaactgattcacgtcttcgtgttcacatcactgacgcgaaacaacaacgatgggaagttccatacaatctcctcccacgagaacaaccaccacaagtcggaaaagtcatcggaaaatcaagaaaatctccaatcacagttcaagaaatctccgga

SEQ ID NO: 455 - DNA, 364 bp, Arabidopsis thaliana
  misc_feature (1)...(364): n = A,T,C or G
gggctttttgatatgtatgatataaaggacaagccagtcatgaagaaatcaggaatgcacaaggtatgccttgtggaagggtcgtcaagccagcaagnngcaaaagctaaaaaaatggaagatgtagatcatattgaaactnngttcaatgtttcggagaggtttccggatttcacattcaagtggttctcggaggataaaccaacgcgaaataagttgactctgtcaaaagttacgtatcaaaagctcaaggtgttctatctgggaagatgggagagaactgccaagcgccacatcgaggtggagaatcctgagcttatgaaaaatttgaagcgtatgattaaactcaagcttctgagttttc

SEQ ID NO: 456 - DNA, 364 bp, Arabidopsis thaliana
tgtgatctgggtacatatacaacactgattgatggattgttgaaagatggaaatttgatcctggcctctgagttgtacacagaaatgcaggcggtgggtcttgtccctgatgaaatcatttacacagtaattgtaaacggtcttagcaagaaggggcagtttgtaaaagtggttaagatgtttgaggagatgaagaagaataatgtcactccgaatgtccttatctacaacgcggtgattgccggacattatagagaaggaaatctcgatgaggcttttagacttcacgatgagatgcttgacaagggtattttacccgatggtgctacatttgatattctagttagtgggcaagtcggaaacc

SEQ ID NO: 457 - DNA, 364 bp, Arabidopsis thaliana
tcataattggtcggaatattctcaccggtttttaaaaaggtgtgtcgacgccggaagtctcgaagcttgttacactctaggaatgattcggttttattgtttacaaaacagaggaaacggcgcgtcgttaatggctaaagccgcgattagttctcacgcgccggcgttatattccttagcagtgattcagttcaacggaagcggtggttcaaagaatgataaagatcttagagccggtgtggctttatgcgcgcgtgccgcttttcttggacacgtcgacgcgctacgtgagctaggtcactgtcttcaagatggttatggagttcctcaaaacgtctctgaaggtaggaggtttttagttcaa

SEQ ID NO: 458 - DNA, 364 bp, Arabidopsis thaliana
  misc_feature (1)...(364): n = A,T,C or G
tttcttcgtctcccaccatttctgcagaagaagacaaataaaaaagctctcatttatcttcgtggagatctaaaagaaggaggaagacatttcttccctctggatctccaaaagtaagaacatttacaagaaacgagaggtttgggtggggaaggaaagaaggaggaagaggcaatgtcagctaggtattggtgtcatatgtgttcacaaatggtgaatccagttattggtgccgagatcaaatgccccttttgccaaagcgggtttntngaggaaatgagccgtgagattaatggcggcagcagnngcagtctaagggaggttcaagaccctgagattgattttggtacagaccgtgcattgt

SEQ ID NO: 459 - DNA, 364 bp, Arabidopsis thaliana
  misc_feature (1)...(364): n = A,T,C or G
cttcatgaacgaactgcagtcgattggagaacctgtctctggaagagctatggtttctgatgctccaggggtcccgcttcgatcagaaaggtcaattggtgaactgagccaaagaaaccaaatcagacctgacggtccccccggaggggtactagcccttccagaagatggtaacttacttgcagttggcgnnnatgcaaacccatcaaaatacatgtcttttccaggatctcataatcaagagcctgaagtagctttcaacatctctgacaagttagctgccttgaactctggtccaaggaacgaaagaccaacaatgggtggtcaagatggtctttttctccaccaacatccccaacaatac

SEQ ID NO: 460 - DNA, 364 bp, Arabidopsis thaliana
gatctttcctcttcctctgagatgtggagctacgtttggttaccgttggtagctctatctctctttaaggatagcatcataatggccaaggctgcgacgattctcctccctagtcaaaccggatttgatatttctcggagtccggtatgctctgctccggatccgaacctaaattacagaccggttattggtattctgagccatcctggcgacggtgcgtcaggtcgtttgagcaatgctacagacgcgtcctccattgcggcttcgtatgtgaaattagctgagtctggtggagcacgtgtgatcccactcatctttaacgagcctgaagaaattctctttcagaagctagaattggtcaacg

SEQ ID NO: 461 - DNA, 364 bp, Arabidopsis thaliana
tttctctcagagagatcattttgcaggcttttggtaaaactagtgttcctagtcatttcacagagacctctgcatcaaatgggagtgaacataatgttttagggaaggtaagaaggaagaagaaccaatggactaagcagtcaaatggttttaagcaggttttcgaagattggcaggaatcacaaaccttcactgctgcattagagaaagtcgaattctggattttctctagaattgttgaatctgtttggtggcaggttttcactcctcacatgcaatcaccggaaaatggcggtaaaacaaaggagcatatcttgggagatattgagcaaggaagcttttcaatcagcctatggaaaaacgc

SEQ ID NO: 462 - DNA, 363 bp, Arabidopsis thaliana
tttttttacatgaaatttcacaaagatctattaacaccacataattaatcaatatttgaacaaaataatagaaatttacaaaaccttatactacattcatgtatgtacattatgaactattatgatggctgagattcaaagtccatcgtagtgacccccaaaagatatttgagctcttacgacaggaacacctttcataccaaagattgcttcattgagctttgttgcatgattcacaacttctttcatcctcttattatcatcggagtaaatctggaaccgaagcatctggttcttgttcttacagattttgatattgttgtgtccgaggaagaagacacatacggtagcagcagcagctgc

SEQ ID NO: 463 - DNA, 363 bp, Arabidopsis thaliana
tcgagcggccgcccgggcaggttgaaggtgtggcttcctctatgctctcctctgccgctgtggttacctccccggctcaagccaccatggtcgctccattcactggtttgaagtcatccgcttctttcccggtcacccgcaaggccaacaacgacattacttccatcacaaacaacggaggaagagttagctgcatgaaggtgtggccaccaatcggaaagaagaagtttgagactctatcttacctccctgaccttagtgacgttgaattggctaaggaagttgactaccttctccgcaacaagtggattccttgtgttgaattcgagttggagcacggatttgtgtacctcggccgcgacc

SEQ ID NO: 464 - DNA, 363 bp, Arabidopsis thaliana
ccgggcaggtccgggcaggtacatcaagacgtttcatcctgaatggtctccttccatgatccaatctgccatcatgacaactgcttggccgatgaatgctaccggaactgcggttgcatcaaccgagtttgcttatggagctggacatgttgacccaatagcagctataaatccaggtctcgtttatgaaataggcaaatcagaccacatcgcctttctctgtggtttgaactacaatgcgacttctctaaaactcatcgctggtgaagctgtcacttgcactggcaagaccttaccaagaaacctaaactacccttcaatgtcagctaaattgccgaaatctgaaagctccttcatcgtgac

SEQ ID NO: 465 - DNA, 363 bp, Arabidopsis thaliana
cgtccgaaaggtgagcgtcgcagtaaagaccagagggtaagcagtttttatttcttttgtgtgtgtgtgtgtttaaagaagatagataaacagtgtttcgatcttctggtctcatcgagatattaaaagaaaatccagattacaaattctttttctatttttttgtggagtttgaatctatccatcttctgagagaagaaaagggaacaactttttttctccatttcacctaaaaaattgttcatcccaagtttctgtctttggtttcatctagtttcactcttggtgattctggaagataagtcgctgagttaaagttgcagatcttgaggttaagagaaagaaagtgagtgttgtgtaatg

SEQ ID NO: 466 - DNA, 363 bp, Arabidopsis thaliana
tcgcgatcgggacatgtagcatcttcttctggagacaggtctcatttggtcactgagacttatccgtctaggcatttaaggccaccaccacacatttcatggcgtagcggtgatcggccagggagacgcagaagttcctatgagaggtttcagcctcctttcgatgaagttgctctccacgaacggttttcatctgaggaattcatggttgaagatcgccaaccacaatactacggatccagaaacatgcttgatcaccacagagacatgaggcttgacatcgataacatgagctatgaggaactccttgatcttggagaaaggattgggagtgtcaacactggtctatccgacagcgcaatc

SEQ ID NO: 467 - DNA, 363 bp, Arabidopsis thaliana
  misc_feature (1)...(363): n = A,T,C or G
ctctcttctccggcaagaaaagatgcctatgaagtcgttgaggaatgaccatggaacccttaaggccatgatcggatccgatttcaacgagctcactatcgctgctaagaacctagctacacacgccttcacactcactggtttaggctttggtacctctgtcctcgaatgggttgcttcaatcgccgccatgtaaccattctctctgtttctatgtctctttcctctatccgtttcttgtgttgatcttgatgaggttttgatgtaataaatgcagatacttnnnggtgttggatcgaaccaannggaagacgaatatgctcacatcacttctcattccttacatcttcttcagtcttcctt

SEQ ID NO: 468 - DNA, 363 bp, Arabidopsis thaliana
ggtcgcggccgaggtacacaaatccgtgctccaactcgaattcaacacaaggaatccacttgttgcggagaaggtagtcaacttccttagccaattcgacgtcagtaaggtcagggaggtaagatagagtctcaaacttcttctttccgattggtggccacaccttcatgcagctaactcttcccccattgcttgtgatggaagtaatgtcgttgttggccttgcgggtgaccgggaaagaagcggatgacttcaaaccagtgaatggagcgaccatggtggcttgagccggggaggtaaccacagcggcagaggagagcatagaggaagccattacttcttcttcacctgcccgggcggccg

SEQ ID NO: 469 - DNA, 363 bp, Arabidopsis thaliana
aataccctgtttattggtaatcttggggagaatataaacgaagaagaattgaggagcctgttgagtgcgcaacctggtttcaaacaaatgaagattctgagacaagaaaggcatacagtttgctttattgaattcgaggatgtcaatagtgccacaaatgttcaccataatttgcaaggtgctgtcattccaagttctggttcaattggcatgaggatccaatattcaaagaatccatatgggaagagaaaggaaggtggcggctattctttctttccttctccgagtgctaatggagctcaaggagccctgacatatcagtaggccttgaagggggacgtacctgcccgggcggccgctcga

SEQ ID NO: 470 - DNA, 363 bp, Arabidopsis thaliana
ccttttttttttttttttttttttttttttttttttttttttttcgtacaagatgtgaaagttgaatgaaaatttcacaaagaactgagatttgattgtacaaaagatacaatacaaaatctcatcttatacagttatagaaaaaacaacaacaacaacaagagtctatcttaaacccaagaccgagtaacaaaatgatcattacaatttacacgtcctcgttttcttgttcttgattgtcttcttcggtctctccgccttctaaaatcgtctcaagaatcggagaaaccgatggcttcgccggagaaatgatttgtggaggaacagcctccatccaccacgccacatccaccggacgcgtgg

SEQ ID NO: 471 - DNA, 363 bp, Arabidopsis thaliana
ttttttttttttttttttttttttttttttgttttgttgtagctttaatttttttatgcttatggatttttgaagaattataagacaatcagtaaccacaaaaaaaacagaacctgaaaaattgtttctccaatgtcagaaacagagcaagaacagaacatgaactgaatgtattcgttatccgtagtgatgatgaatcttcttcttcttcttcttgacatcacaggtgcaagcatcaactgaataagaagaagaagaagaattcaagcaaccaaacttcctcttcacttgcccccacacacttatcttcttcttcttcttcttcatattcttccgacgatgaacaacacattcatcattctc

SEQ ID NO: 472 - DNA, 363 bp, Arabidopsis thaliana
gcggccgccgccaatatttggtaccgatgagtttggatggtgcacagagtggaatccagcaatgtcaaagttaaccggtttgaagcgagaggaagtgattgacaaaatgctcttaggagaagtatttgggacgcagaagtcatgttgtcgtctaaagaatcaagaagcctttgtaaaccttgggattgtgctgaacaatgctgtgaccagtcaagatccagagaaagtatcgtttgctttctttacaagaggtggcaagtatgtggagtgtctgttgtgtgtgagtaagaaactggacagggaaggtgtagtgacaggtgtcttctgtttcctgcaacttgccagccatgagctgcagcaagc

SEQ ID NO: 473 - DNA, 363 bp, Arabidopsis thaliana
atgtcaaataaataatggcacataagagtacaagaattttgaggaaatgaagagaaaactgttgagcaatgagagagtcgagtatcagaattcagcagaggcaggtgtgcgcgggaaaggaataacgtctctgatattatcaattccggtgacaaattggaccagtctctcaaaccctagtccaaatcctgcatgaggaactgaaccatagcggcggaggtcgaggtaccaccagtagctctctttgttgagtttcaactcatcaagcctcgcttccaacacctcaagcctttcctctctttggcttccacctatcagctctcctatccgaggcacaagcatatccattgctgccactgtctt

SEQ ID NO: 474 - DNA, 363 bp, Arabidopsis thaliana
  misc_feature (1)...(363): n = A,T,C or G
gcggccgcggcccttcaagctgcttctttggtctcctctgctttctctgttcgcaaagatgcgaagttgaatgcttcttcatcatctttcaaggactcgagtctttttggtgcctccattaccgaccaaatcaaatccgaacatggatcttcctcgttaagattcaagagagaacagagcttaaggaatctagcaattcgagcccaaaccgctgcgacttcaagccctacagttacaaaatccgtggacggcaagaaaacgttgaggaaaggaaatgtggtggtcactggagcctcgtctgggntaggtctagccacggctaaagctctagctgagacagggaaatggaacgtgataatggcg

SEQ ID NO: 475 - DNA, 363 bp, Arabidopsis thaliana
cctctagagcggccgcccttttttttttttttttgatctttcaaaaacccaaaaagggtcaaagctttcgacgatggagatgaaataaaaaccaaacttaaacagttgttacaaacaaacaaaacagagagagagaaaatagaaatagtcctcacagctactgatgaacagaacttaacactttttttttatctttcaccattttttaatcatacagtagtttttaacatttttaactcaaaccttcaacgatttagctggttcgctgcagctatgaatctggtttctcttcctcctctgtgattaaacattgcaaatgttgattccatggaaacatttgcatcctcaccgaatagacgattt

SEQ ID NO: 476 - DNA, 363 bp, Arabidopsis thaliana
agaagtcaaagacgataacaatgacgtcatcatcgtacctccgatttgcgatcgccgtcgtagctttcctctcaatcaccaccatcaccaccgcacgtccttgcaaaaccttcctaatctcctcatattccctctcaataaccccagaaaaccctaacctcgaatccgatttcacctccacacgattcgtcaccgttttcacaatccgtcgtctaaatcctcaccacgtggttcctttcttcgtcaatcgtcgtcacgagaagccacagatccaatcggatcgttccctccctttgatctctgataacatcaattcgtttagagatcgaaccagagatattcttagcgtcgtcgtcgcgcttt

SEQ ID NO: 477 - DNA, 363 bp, Arabidopsis thaliana
ccggttcttctaccttgctccggcgattccaccggcggcgtcgaggatgattctccagcgaccgtatgtatcgtcgggagtgggatcggaggctcatccgtagctcacttcctccgtaactactctgtttccaccggcttaaatcaagccaagatcctgatgtttgagcgtcacgagatagtcggtggacgcatgaggaccgtcactgtcgccggtgatactttcgaagccggcggttcgattctccatccgaagaactaccacgttaaggatttcgtcgaaaggttcaatctgacggttcgattaccgacgccgattgaagaatcttcagcgattggaatctgggatgggaagagatttgtc

SEQ ID NO: 478 - DNA, 363 bp, Arabidopsis thaliana
aaaaccaaaccaaacaaaacaaagaacaacaaataaccaatattttgaatcaatctgcagagaagagaattagcaccatctaaccttcttctctagactgaatcccaatcagtctcagccacgacattcaaaaccgcagaggccaagagtatatcacaaaaaaaatatttctttggaaaaaacgacaaaaccataccaatagagaggagaaataatgcacaccactcccaaaaataaacaaagcctagtgatacacaaaatctgatgccagctgatattttttgtgtatatgagaagaatatttcgtcaaacaggccctgaaaatacattctctaagatatcatgcagtttcggagctcgtct

SEQ ID NO: 479 - DNA, 363 bp, Arabidopsis thaliana
cttcttcatcggatcatcggccgtatctgaaaccggagatggccggcgttgattccggcaagcttatcggctctgagattcatggattccatactttacaagatctagatatacaaacaatgttagatgaagcatacagtaggtggctccgtcctaatgagatccatgctcttctctgtaaccataaattcttcaccatcaacgtcaagcctgtgaacttacccaaaagtggtacgattgtgttgtttgatcgtaagatgttgaggaactttagaaaggatggtcataactggaaaaagaaaaaggatggaaagacaattaaggaagctcatgaacatctaaaagttggtaatgaggaaagga

SEQ ID NO: 480 - DNA, 362 bp, Arabidopsis thaliana
tttttttttttaataaaattagtagatttggacactggaaattacaaatcatccgagttttagaactaaagcagacctattaaggatgaaaatcatctgagaaatgactatccgaggaaaacgaatgccacggtgcatcaaaacactgctttaaacagctaagtgcattttgtactcgcactatatacagtactcatcgaaacgatacttggatacttgagatgatcaacatcagattctttcgaatcattttgcatcatcaggtttttggccaccagctacgctactggaagaactgtggtctcgtacgctcggagaagatgaacacttgctagaatgagagctttcttctattgagttgt

SEQ ID NO: 481 - DNA, 362 bp, Arabidopsis thaliana
  misc_feature (1)...(362): n = A,T,C or G
ctttttttttttttttaaggaaatcaaagtagattttgaccgcgacgttaaaaacttgagaagacatgttcaattattaatgtcatatacaattatgtaacagggaaaatatatttcaaacaagataattaaccaaccacacatgtaagtttttattcaagattacatatactttcttctaatgatcatgcctccagcctctctttccaaacccggtaggactttgactaggactaaccggtttacgtcggatatccgattttggnnncggactcctaggaccgggataaccagttgttattgctccacctgaacttgacgaatcacaacctgatccattaaccgacccgtttttggtcgag

SEQ ID NO: 482 - DNA, 362 bp, Arabidopsis thaliana
tcgagcggccgcccgggcaggtgtcttgatctctctctcactttctaataagatcaaagaagatgtcgaaagctaccatagaactcgatttcctcggacttgagaagaaacaaaccaacaacgctcctaagcctaagttccagaaatttctcgatcgccgtcgtagtttccgagatattcaaggtgcgatttcgaaaatcgatccggagattatcaaatcgctgttagcttccactggaaacaattccgattcatcggctaaatctcgttcggttccgtctactccgagggaagatcagcctcagatcccgatttctccggtccacgcgtctctcgccaggtcttgtacctcggccgcgacc

SEQ ID NO: 483 - DNA, 362 bp, Arabidopsis thaliana
tgttgcggattcctgaaagattaaggcttttagctccaagtttccaagagtgctgtgaatcagctcccactctgtctctgcatattgcaagacaccgggtttgtttcagaagtttgtttcttcttgtctcatgatcactagttttcagcaatggggtatgtaaacgtggagaagagatgggtttttcctcttgtcatcacatctctcgtctgcgtttttcttcttgcaacttctttcaacatgggactagtctcttccctccgaacaatcaacgggattttctccatcataccttcccgtctcgtcaagaaccaaacgagacttgattttgcagagtctaaagttgctagacaaacccgtgt

SEQ ID NO: 484 - DNA, 362 bp, Arabidopsis thaliana
aaatccatgagtacaacacttcttcttcttctttctaagtccagttaaaaatcatctctgcaatgttgactctttaatcttcgatttataagctctcgaaggaatctattaccttcaatctctctcgttgttagctctttgaattgtagaagagaatgggttgcttacttggttgcttcggtcgtcggaagaatcgtcgccgtcagagacgcagagaatctttccagccacgtttaaacagaatctctgaggaagctgcaaaggatgttcttttgaatcttagggttcctactgttgaaaaagtcccaaagtatgcaaaagattcaactgttgtggaagtccctaaaatctcggaggtgtct

SEQ ID NO: 485 - DNA, 362 bp, Arabidopsis thaliana
tcgagcggccgcccgggcaggtctctctctggtcagctgtctcttccccattctctagggttttcaagctcaacctcaagctccactacgatctcttcttcttctctaatctcagttgaaagatgcaaggtgtaattcgatccttcgtctccggtggaaatgttgtgaaaggctctgtgctgcaacatctccgtgtgattaacccggcgattcagccttctgtgttttgttcacgctctgaatcaactcaacctgcacgtatggaggaatctggattcgagagcacaactatttccgatgtcatgaaatccaaaggcaaaagtgctgatggatcttggctttggtgtacctcggccgcgacc

SEQ ID NO: 486 - DNA, 362 bp, Arabidopsis thaliana
gtcgcggccgaggtaccagactcatatgaacacctaattcatgatgtaattgacggagacaatcatctgttcatgagaagcgatgaggttgcagcagcatggaacattcttagtccggttctagaagagatagacaagcatcacacagctccggagttgtatgaatttggtggacgaggaccagttgcggcatactatctttgggccaagcacggtgccccatgggcagatgactgaagaagaaacatagatgcagcaacaaacaaatgagagtgattctgaatggttattgtgaagtgtgtttgtttagcttgaagctgtgccattccctgtagactgtacctgcccgggcggccgctcga

SEQ ID NO: 487 - DNA, 362 bp, Arabidopsis thaliana
ccacgcgtccgctttgaggactttgaatcaatcgaagaagataagcgaagagctatttgcgagagaagtgcactcgagtttgcgaagatgcttctcaaggaaaggagaaagtttaagagtatcggtgaagttgtttcagcaattcaacaacaaagctaagacaatttataatgttcttctgctgaagttcttgaaagtcttgttttgatcttgggagttaattggcaagaaaagtatcacaatgctgcttatcacatggatttgtaatttagtggtttgtggtggtgatgatggtattcaaatgcattttgttacaataataataataaaagtttagaaataaaaaaaaaaaaaaaaaaaag

SEQ ID NO: 488 - DNA, 362 bp, Arabidopsis thaliana
aatatgataaaagaggagcatcttcaaaccagataaactatgatagttttaatagtaacataaacacatcaactcccatgaacataaacatgaaactgtcaaatggcattggagaagagattatcatattaaaaagaagaagaaaaagaaacagaaagatggtctgagtttagagggaggaatggatttgctctgtttattgatcctcaaactcatgcatgtgatctagaaggtaattagctgcaagttcttcattcttgttacacgcaaagaacacttccaagaccatcgcacgatcaaaccccatcccttcaagccgttcaatggcttcacgctcttcaggtgtaacggtaacagcttgt

SEQ ID NO: 489 - DNA, 362 bp, Arabidopsis thaliana
atcctctagagcggccgccctttttttttttttttagtaaaaatccacaacacacactttgatagatcaattgaaatattgtaataaatagatttacagctcataaatttgaaaaactagaccctaaaggcacactttcaatcagatcacactcagatagatttcttgaagtgaaggaaataaagaacaaatgttgatcactacaagcctacaaggtaagtttcatatggtgaggttttcttctactacaaggaacgatcctatgatcttgccaccgagatctgggaatgtctcgtatccaggaagagaactcactttgcctgttctatcaacttgaactggatacttaagaagatgacctg

SEQ ID NO: 490 - DNA, 362 bp, Arabidopsis thaliana
ttttttttaaacaaatacatctttattcatgatattccaaacttacagaattctatatcgaccacattatgtgacaaaatttcagctttcttctgcaaatctaattggaaatattacaaacaatacaacaacaacaactctcaaatattcaatctctctgtggaatggagcagccaaccatcattctgattctgactggaacagccaaccatcattctgattctgactggaacagcttctccgtgtttctgggttttgctggaaaatcaatgcttgttttcaacttcctcctcttgccattacttacttggtctccactatagttgatgctagttttcaactttttcgtcttgccattactt

SEQ ID NO: 491 - DNA, 362 bp, Arabidopsis thaliana
ttcccttgtgtatttcaagacatggacttgctgtattttgaccttttcatggttactccattatgttaaactttttgcgttgcaagatcattttgttttcaaagttcctgtgactttgttgtgtttctgaagggtgttaggttttgcatcagtttataaaagtcttctcttaatttcttaattcattgtgcagatattccaatacagtactttttaaaattggcctggtgaatcttctgaagttattaaggagctgatgcaaatggagttgtttagtttttggatgaaatgttactctttcgtgtcttcaaaatacatgactcttcaaacctttcaagaagttttagttttcccctacttgt

SEQ ID NO: 492 - DNA, 362 bp, Arabidopsis thaliana
cctctagagcggccgcccttttttttttttttttttagaaccgaagaattgtctttagaatctccattgtgtatatacaatgttatattatgaaccaaaacacaaggtgagagtctagctactgtgaaagcctttgttcaagggcaaaattctcagcaagctttagcaactccaaggggctaagaccgcacaactagttttgcagggaacaaatccgtgacctattgctgtatctttctgaattccgagagcacggggtatatattctcaaaggctttgtaggtctcatctctcatcttggctcctgttattacgatcttcccagagacaaagattagaaggacgatttttgggactttcat

SEQ ID NO: 493 - DNA, 362 bp, Arabidopsis thaliana
ttttttgattctggaagatatgtatatatggacagtgattatagtctacataagaatttgagcaaagaagcttgctctatttgaaatagagcggtacaagtttcttcaaggtttcaaacacacttgtgaagggatcaaactggactgactttcttaatccaagatctggaaactggttggtcagtgtttgctccatacctggcatggacatcatggctgctagctcagcatcagtcacttcacagtcctgtggtgtatcctttattttttccgggtcatagccaaattgtgccaagtagttcttgtactttgcgatgaactcaggtcctggatttggcgtccttgagtatacctgaacaaag

SEQ ID NO: 494 - DNA, 362 bp, Arabidopsis thaliana
tttttttttttttactagtaatcatatttattattgactcatgtatgcgatacataaagaggaattggtttgcgtgagaaacaactacacaagtacatttctaaatctctctaacttcaaaaatcaaaacatattgaaacaaaaggaataaacatgttataaccaatacatagaccgaacaaaaaaggaaacgatacagagaacccaaagaaagtctcattttcagctttattaagagcttttactgataagcaacaatggcttctaaaggaatggaggaagtatcacccatcttcttggatactttggctttccatcttttccatcaaatatctttctcagacggctgtgctttccaagag

SEQ ID NO: 495 - DNA, 362 bp, Arabidopsis thaliana
  misc_feature (1)...(362): n = A,T,C or G
ttttttttttttttttttaagccatctacctttgttgtcttatatcaatcaaatccatttacaatatcactcacacaccagtctcaagtctcacttaaaaagcagcaacaggtaagagaaaatgataaacactgagctaatctgtgcttgcgcaagnnntctccatcagtacctttgaatctgttctgaaagactgctttgatggagagcttgatcctcttgaagagctatgcccaaagaagctaagtttccccattttctttgagaaactgcncatgaatttgcgcgaatgagacctctgcatatctctcttcatacatatatgttctttctctaggtcgttgagtctcattctcaaccta

SEQ ID NO: 496 - DNA, 362 bp, Arabidopsis thaliana
ttttttttttttttaataaaaccctttagcgtttatataaagttacaaagattacaatttttgaagtaagtggtgattaacgtgccagaatttgcaagtaatccaaagattctaactttcgttatccaaaactttgttgttaccaaacaaatgatctcttctattaccaaacccgtttgaatcaagacccgagccaccaccgcgataattgttatgatcctgtgcggttgttctatagtttccatcaaccggagctcttgaactcgggtcgttagctccaactgaccggtatgagccaccagcgtaccttctccgtagatccatgaggtcatcgtttcttcttgaaggttcagtaaatgttg

SEQ ID NO: 497 - DNA, 362 bp, Arabidopsis thaliana
attcgcggccgctagaaactttagaatacccaataatggatccgatcgaatctgtcgagtacaatggcttcgagacctctaacggtaacgtcgaccatggttggaagaaagtcgtgtacccgaaacgtcaccggaagcaaaaacaagcggatcaagcgacggcaaatggtggcaaaactgttgcttcaaatggaaccgtagctaacggcggagataacgttttccgttcgttggaagagcaagctgaggatcgtcgacgacggatcttagcggcgaagatgactgctattgattcagatgatgatggtgttgttagatctaaacatcgatctaatggttacggtgatgatgggtatgatttt

SEQ ID NO: 498 - DNA, 362 bp, Arabidopsis thaliana
cggcgacggagtaacgaaacaaggagaagaagaagaagaagaaaatgacgactcgaatcgctcctggtgttggagctaatcttctcggccaacactccgctgagaggaaccaagacgccactgtttacgtcggtggtctcgatgctcagctttctgaagaattgctttgggaattgttcgttcaagctggacctgttgttaatgtctatgtaccgaaagatagagtgacaaatcttcatcagaactatggattcattgaatatcgtagtgaggaagatgctgattatgcgattaaggttcttaacatgattaagctccacgggaagcctatacgtgttaacaaggcatctcaagataagaag

SEQ ID NO: 499 - DNA, 362 bp, Arabidopsis thaliana
ttgagaaaggtgaaaaagggaagatgatgagtaaaaaaagaatgttaagaaagatggagatgagagtgaaagtgggttttggtttagattcaagtttatctttagttgtatctcttctagatcaaaagttgatagttccatgaatgctactgctgttattgcagaacctaagaaagttattgagaagcttgaaggtcatccagctccgactaaagacactggctgtgcggagagcggttcctcaacacctctaatgagcggggaattgaagtattcttctaagctacggattttcatgtttaacgaccttaagttagccactaggaatttcagaccagagtctcttctcggtgagggtgggt

SEQ ID NO: 500 - DNA, 361 bp, Arabidopsis thaliana
ttttttctgtttctatctcatatatatgtttatagtgttcttcattgtcgtgtatacacagcttaaaatgcagagtaatctcctttgtggcaaaatattgaagattgttattcttcagttgatatctgtgacccatcccttgttatcttcaatcaatcctgtctggatacctacgaggactgaacgcagtttctggcagacagattcatccccggttttatactctactcttttttcctgatatgtgatagtgcccacgggagcaactactacagcagttccggtgcaaaaaacttcatctgcatccattacttcatccacatgaactgccttctctactacctgataaccttgatcactt

SEQ ID NO: 501 - DNA, 361 bp, Arabidopsis thaliana
tcgagcggccgcccgggcaggtcgtttcatcagccgtggacatgtcaatcatctcctacgacgagaaacatggcgtctccaccaccggtggccgtagcgaagccgaggttatgagtatctacgaggcatggttggtgaaacacggcaaggctcagagccagaactctcttgttgagaaagatcgacggttcgagatctttaaagacaatcttcgtttcgtcgatgaacataacgagaagaatcttagttatagattgggtttgactcgttttgcggatcttactaacgatgagtatagatccaagtatcttggagctaagatggagaagaaaggtgagagaaggactagcctacggtacct

SEQ ID NO: 502 - DNA, 361 bp, Arabidopsis thaliana
ttatttaacacacacatagatatatcgttgttattacaaacaagaaaggtagtacttatagacaagcatgcattcttctccataagagaatttgcagcaacggattcggttgaacgttattgtaacattcaatacaatcaaccgattcgatccgtcgcttattttattattttgtataaacatgcatgtttgtatcattcactgatatctaaacacacatcacaatatggcagaatatataactggtagataggttcaacatgagctattcattcttctggtcttgatcgaatccattaatgcgcatcagagatactcagtagtggatacaattgagatctcaacaccgatatatatctga

SEQ ID NO: 503 - DNA, 361 bp, Arabidopsis thaliana
  misc_feature (1)...(361): n = A,T,C or G
gcatcgtgggcaggggattatgaatcgttcgaatccgttgtagtctcattagttgtggggaaagaaccgttagaacggtaaaatctccaggcaacggtccagtccatcctttagaaactttccaccgggacttggttaggcgggacgtcaacatatccggttttggcttcgaacctttatggaaaaccctccatgtttgatgaagtagtatatctatgatcctccaagaaagtttcctgcaagtcgtcctcctggctttatgcgaagnnnntatcattatcatcgtggtgttcagcaatatccagttcaaaccgacggtaactcccccgagttcaaacatttcgatacacgaattaacgtc

SEQ ID NO: 504 - DNA, 361 bp, Arabidopsis thaliana
taaaccttcactacacattaccgaaaaagaaaattgtgcatggggaaatttgcaaaagttcttgttacccgcattgttgtgtttcctgatttccgcaatttcatttatatggatgcctcatgccatttttttgactgttgtggctgtgctgcttaggccgctttcatgccatgatgcttttctttgaccgcaaatatcctcctcatgtgggtcaacattttcaattgaaaatttgttgccttcgttggtgttcagtttatgcgcatttgcattagctctacagtttgttgttccgtttctgttgcaatgaattaccattctcaataatgctctgtctctatataacagtcctcattcatta

SEQ ID NO: 505 - DNA, 361 bp, Arabidopsis thaliana
  misc_feature (1)...(361): n = A,T,C or G
tggaagtgaaagctatgaacaaagatactgaagctgatagtgatagtgataggaagattaaagaagaggaaaggagaaggaagattggattagctaataaaggaaaggtgccatggaacaaaggaaggaaacacagtgaagacactcgaagacgaatcaagcagagaacaatcgaagctttgacaaatcccaaggttcggaagaagatgtccgatcatcaacaaccacacagtaatgaaaccaaggagaagataagagcttcagtgaaacaagtttgggcagaacggtcaagatcgannngattaaaggagaagttcatgtcatcgtggtcagaaaacattgcagaagctgcaaggaaagg

SEQ ID NO: 506 - DNA, 361 bp, Arabidopsis thaliana
cttaatattatacgcaacagagcacacatcaaacacctacgcttgtcaactccacgtggcactaatgacagcgctgagccagtagcgagtgaagctttatcacttgagtacgatgcaactcgcagcgatgtgcctggcaacagtagctttgtcatggcacataaaagtgttttgatgtcgcggtcacctgtgtttcgtgctatgtttacacatgagatgattgaatcacaagagagtgtagttgagctaaccgacatcaagcaccaaacacttcaacgattacttcaatttatctactgtggtgcattaggtgtgaacatacatcaccttgtgtccacaccaactgtagaaactaacaaca

SEQ ID NO: 507 - DNA, 361 bp, Arabidopsis thaliana
gattctgagacgctaatgagtcggaaggatgataatcagtcaggagaagttggtcgtactctggtggactttatggaagtagccatcacaatgattgtatacctcaaaggtttttacccatctgcggcatttgaaaggaggagatatatgaatgtggtggtgcaaagagcaaggcatcctgagctacgcgactatattcactctgctgcttctggacttcttccttttattgaaaagggtcttgttgagagagtagcagtcgtgtttttcagcgaggataatgttcctgtagagaggttcatcttcaagatcacgattaaaccgtcttgcgctgctttagtagaagagggtcaactggagt

SEQ ID NO: 508 - DNA, 361 bp, Arabidopsis thaliana
tttttttttttttttttttttttttactaaaaaatgaggacgaggtaaacttttactcagtaaaacaccacaatcaaatttacagttacattaagagaaaaaagaagaaaacaataagagatatactaccaaacaaaatatattgtgttgactagtgcagtaacttgtgtggtattaagctcgaaggagacgcttctcgcatgttagaatcctgtaacttgcgtgaggaccctcggatgtgtcacgcagagaagtatgccaacccatggcctttgtgatttcttgaatttcatccataacatcaattgaatccctaatgtatgctcttccaccgggtcttaatatccggtcggacgcgtgg

SEQ ID NO: 509 - DNA, 361 bp, Arabidopsis thaliana
cgcggccgaggtactcatctttccacggaagacagcagaagctgtcaagtaacgaccatgacgaggatcagctgcacacatcatgtttttggcatcccacatctgttgagttagctcagggacactcaaggcactgtattgttgagatcctcttgatgtcaaaggtgcaaaaccaaccatgaagaagtggagtcgtgggaaaggaataaggttcacagcaagttttctaaggtcagagtttagttgaccagggaaccgaagacagcatgtaacaccactcattgtagctgagatgagatggttaaggtcaccaaatgtaggattagcaagcttcaaggtacctgcccgggcggccgctcga

SEQ ID NO: 510 - DNA, 361 bp, Arabidopsis thaliana
tcgagcggccgcccgggcaggtacacatcagttccagtagaagctcccattgttgtaagctcaggtgccatgtaaccaacagttcccactgcagctgttgtgcttggatcagcccctctgtcatataacctggacataccaaaatctcccaaccttccattgaactctgcatccaacataacatttgcagctttgatgtctctgtgtataacaacttggtcagcttctgtatgtaagtaactaagagctgatgcgatgtccctaaggatcgcaagtcttctccaccagggaagagacaatctatcatgattaaacaagtaatggtcaagactaccatttggcttgtacctcggccgcgacc

SEQ ID NO: 511 - DNA, 361 bp, Arabidopsis thaliana
tttttttaaaaaatgaacactaaattgaattccatgtgtattatagtgtaatacattcaaatcaaggaatctgaaataaattattgatattgtatggaccaaccactatagaatctgacatgtgtccaccgttccaaattaagtttgcgaattggttatatgtattttgtgtgagatgaagtgaatcccaaaaaatataatctttaggattctcacacaattgatattctttcacaattctcttccctccacagctgaatactcctctccacttcccagttccacaacaagcttcttccccttctttaaacccaaatttagaaggatgctgcattctgagtctaaggcttttgttcatgtc

SEQ ID NO: 512 - DNA, 361 bp, Arabidopsis thaliana
tttttttttttttgtttgttttctttccagagaaattcaaagaagaatctggaaacattatacacagcttacaatagaaagaacaagacgtgcttttagtgtagcctcaccgagacaaatcatcaaaccccattccaacccaacaacaaatgacatatggcaaatacaccaagcaaagaaagataaaaactgcacattagagaaaaatcatttttctcagtaaaaaccatgaagatggagaaagtaagtactttcacaaagtaattcacattatgcgctgcaaaccaaatttcacacttgtgtgcttgagagacatctccattgccgtattcgaggagtcttttctagaagcatttgcaat

SEQ ID NO: 513 - DNA, 361 bp, Arabidopsis thaliana
  misc_feature (1)...(361): n = A,T,C or G
gcggccgcagagtttgatggctgaagttaagggaaagaactttgttgatcacttgaacaacaatgagcctacaccgggaagtgggattaaacgaggatttcttttcggaaactcgatatgtggcgaaggaagcacctctcaagattgcaatgttggcaaggacaannnggtgttagaggttagacctgtcaaggttaggagaacaatgattgatcttcaacttcccgcagatgagtatctccatacagagggtgataatacgacttgtcctccttatgagcagtcaaaagaagttggtgaaaacatcttctttgaatctcatcggaacgattcttctggatcttctttgcttatgaagaac

SEQ ID NO: 514 - DNA, 360 bp, Arabidopsis thaliana
tttttttttcagaacattcgtagcaacattcaaagaaagccgaatccaagtatggcttaagcagaggtgatgatgtatatacaagtcaaagaacttaaattctttagaacaaagttttaaacttgagaaaaagctcttcttttaatcgaatcaatgatacccaattggagctggagcttcctttagttcacgaccttggtagtgaatatcagatgcaaaatggtttacatcacggtgatgagcctcgtcagcacgaacaaccatcacaacatcacgaagtgtcgcatcagcaggaagcctccagtaatcaatagcaatagccggagcaggaacattctcaatgttacctttgtcaagttc

SEQ ID NO: 515 - DNA, 360 bp, Arabidopsis thaliana
  misc_feature (1)...(360): n = A,T,C or G
ttaatacaatagaaaagctcgctctgttcttgaaactcaccaccttaaaacgtaatttttctttttttatcttcttcctctcgctctctgacaacaaattttatgaacttattgacaaaaaaaattcgaaaatccaatcgtatcgtaacctcatgcactctcttcttctttttcttcttcttcttcttcatcaccattttattttactataattaccaactgtaatacgactgagccgtcgcatcaccctcgtatatgctaccaccggcgannnagacgaaggagaactcatgagttcttgacaaggctccggtgatacgtcgtctgagaaaccagagacgttggagcatatccaagatt

SEQ ID NO: 516 - DNA, 360 bp, Arabidopsis thaliana
attgatgagagcttaatgtgctcattccagattctaaagccgtcagaaaagaagtcgccttttctgtgacaccgattatccagtgaccaccattgcttcaaattaacaattctacaaaagttgtatactggcaagaggatctagagacggaaactgctcaattgggaccttaatggtactgataatagagcattagacatgtagctgttgacagtgatggcatcgagcagaaggaacaagtcaagtctgtactgtgattttagcatctctcacatctatgtttgtctaaaatgtgtgtgtgtttttagtcttctctctgaataatattagattctcatttgtactctctatttatttagg

SEQ ID NO: 517 - DNA, 360 bp, Arabidopsis thaliana
  misc_feature (1)...(360): n = A,T,C or G
ttttttttttttttttttttttttttttttttgggttataaaactgattgcattgaataaagaagttcagtaatatagacttttagttcgatttttggtttgtgcggacgttgaacgagaaagnaaagagggacagtgggtgtgggttttgggaagaatgtgagacgcaaataatctcaattcaaatggaatcaaattagatggcaaagacgaggccttgaagtcaagtgccttccattggctttgatcatcgccacaactcctgcagtcactccagcccacaaagccgacgccagatactgctgcgtgtttcttcccgcttgatgaattgtgaaagatgtcactgttacaccacctatc

SEQ ID NO: 518 - DNA, 360 bp, Arabidopsis thaliana
caccacaactcttcatcctcctcctccgggcgtctgtcttggcgacgttctctcacaccggaaaatacaatcccgctcttcccatcttcctcatcctcatcccttaaccgggaacgatcaatagtagttccggttacatgcagtgctgcagcggttaatcttgctccggggacaccagtccgacccacgagcatcttggtggttggagccactggaactttgggaagacaaatcgtccggagagctttagatgaagggtatgatgttaggtgtttggtccgaccaagaccagctcccgccgatttcctccgtgattggggcgccaccgtagtcaatgcggatcttagtaaaccggagaca

SEQ ID NO: 519 - DNA, 360 bp, Arabidopsis thaliana
  misc_feature (1)...(360): n = A,T,C or G
acggaactggcggaggcggtggagtatttcgggcagtacgacacggcgaaggtggagaaagaggtgtgcgagagagatctgacggcgaaaaagggggagatggaggagatgacggcggagctggtgaagagggagaaggaaatcaaagaatgcagagagaaggtgacggtggtcgcagggaggctagggcagctggagatgaaaggttcgaaattgaacaagaatctcgacctcttccagtccaaagtccacaaattccaaggagaagccgtccttctccacctttagctccgtctccaatttcttnnnntttggatctcattattcaattattttctattgacatgaaatgtttataaa

SEQ ID NO: 520 - DNA, 360 bp, Arabidopsis thaliana
catagggttcatcaacctcattttcctgaccccgctgcacatccaagaccaatggtacctcagaaagaccttgcggtctatggatatggaagtgttgcgtggaaggatcgtatggaggagtggaagagaaagcagaacgaaaaatatcaggtggttaaacatgatggagattctagtcttggagacggagatgatgctgatattcctatgatggatgagggaaggcagcctttgtctaggaaagtaccgataaagtcgagcaaaataaatccgtacaggatgctaattgttctgcgtcttgtgattctcggtctctttttccattaccgtattcttcaccccgtcaatgatgcttacgcc

SEQ ID NO: 521 - DNA, 360 bp, Arabidopsis thaliana
taaaatggcaagaacaaagcaaacagcaagaaaatccactggaggaaaggctccgagaaagcaactggcgacgaaagcggcaaggaaatcagctccagccaccggaggagtgaagaagccacacagattccgtccaggaacagtagcgttgcgtgaaatcagaaagtatcaaaaaagcacagagcttttgatccgtaagcttcctttccagagattggttcgtgagatagctcaagatttcaagacggatctgaggtttcagagtagtgcagtcgcagctcttcaggaagcagctgaagcttatttggttggtttgtttgaagatactaatctctgtgctattcatgctaagagggttac

SEQ ID NO: 522 - DNA, 360 bp, Arabidopsis thaliana
gcgtcatcgccgcaggaggagggggggagagcaggaagatacatgtcggggtctcggacgacccggtgggtggcgcaaagcgtcaagcgaaccggtgttacagggagttactaagttttcgttaattttagtactcgccagttcgctattccacgatttgtcggagaaatgtcggggtcgtggctggaacagttcgtcgcgcccaatcggacaattccgtctcacttggtcggtgattctttcagaatcaataggttgcgtttcgctctatttcgttcatccgcggcccgctgaacgtcacgcacgtccagcttgaccccgacgcacggcctgccgaccataagctgttaattcgcgaca

SEQ ID NO: 523 - DNA, 360 bp, Arabidopsis thaliana
taaactgaaacccaaacaaatcgtttccacttctcctccacctcctccaacaatctctgcagcagctaaagctttcaccgatgcgcacaacaaggccagagccatggttggtgttccaccactagtttggagccagacgttggaagctgctgcgagtcggttggctcgttaccagaggaaccaaaagaagtgtgagttcgcgagtctaaaccctggaaaatacggcgcgaaccagctttgggctaagggcttagtagccgtgacaccgtctcttgctgtggagacttgggtgaaggagaaacctttctacaattacaagtcagacacgtgtgctgcgaaccacacgtgcggggtttataa

SEQ ID NO: 524 - DNA, 360 bp, Arabidopsis thaliana
taacttcgggaagtgtcggtctatcacatcttttaaagtctctgtagtattgacccactctaacccttctttagtatacgtcttctcgttgaagttggtcgtgaaaaacctatctgcttctagcctcctggaggcgacaaggaggaagatgaagaaagcagtttcgctaatggcgaatcctttgatcttcttctctgcgtgcaatcccacgttgaggtcaagcttctctatatcgtcttcgtacacttctcttaaaaccttgatagcttcttcatcatctgtcaactcttcccatttgctgatcggactcatcagcagattctttctgaattcgttgtacctgcccgggcggccgctcga

SEQ ID NO: 525 - DNA, 360 bp, Arabidopsis thaliana
cccgggcaggttacacaaccaacaaaaactacaagacgataacaacaaaatgtctcttttctccttccccatctccactgattgcttcatggcttctcctacttttgattcctccacttcttatcttctttcttcttcgttcccctaaaaatcttccaccaggtccaccaagattacctctcttaggaaacatccaccagctcggatccctccctcaccgcagtctcagagatctctctctcaaatatggttccgtcatcaccgtctatctcggaagcgtccggaccgtggttgttcactctccagagacggcggaggaagttctaaaactccatgactccgagtgttgtacctcggccg

SEQ ID NO: 526 - DNA, 360 bp, Arabidopsis thaliana
tcgtctcttctctcttccgttttttcttcgtctcctcgtctcttacacaacttcgtcttctccactagtaaaacttcagtagcttcttcttcttcttcgctaacaagcggttcacgcatcatctactcatcagagaaaccctagcttcttagtcttcttcttcctctctactcttcaacacaatcttcgaaatggcattcgattacggattagggtgaaggaagaagcgaaatcgaaatgaaaattcttcagatagagaagaaactttctaaatctgagaagaaacctaaacgttggagagagattcctagaaacgctacagaggaaaaaaagaaaagacctgcccgggcggccgctcga

SEQ ID NO: 527 - DNA, 360 bp, Arabidopsis thaliana
aaaaactccaagttcttacctttttcccatttacaatcagtaaatttctccgatcacgagatacaaatttcactttctgatatcttggatcttccgatcactttgaattttttggtttgttgattttttttttttttttttgttccataaagttcgaattttttatagagaagaaaccatgaatgctttagctgcaacaaacagaaacttccgtcatgcatctcgaatcctgggtttggattcgaagatcgagagaagtcttatgatcccatttagagaaatcaaggttgagtgtacgattcctaaagacgatggcactctggtttcatacatcggatttagggttcaacatgacaatgc

SEQ ID NO: 528 - DNA, 360 bp, Arabidopsis thaliana
tcgagcggccgcccgggcaggtactttctttctatgttctctcatctaagatgtgtaaattgtttcgactcctatgatgataacaaacaaaatttcaaaaagatggaacctttcttcgcctacggcgccatcagaccatccaccgtataagaaagagacttagcccagtcggttttcaacaccattgtttgcaacgtgtgcatcacatcatatcctgggtcaagtttccgttgccaaccctcgagaactaatgttgtcaccataacagtgcacacattcccatcaatatttactctatgacgtcttactttctcaagtaattcgtgcatacaatctgctggatgtacctcggccgcgacc

SEQ ID NO: 529 - DNA, 360 bp, Arabidopsis thaliana
tcgagcggccgcccgggcaggaccacaggtaatccgaagtgtctcgtgtagtgtttatctgctccactaatccgaccattgtgaatgactcatcgatgtaagttgatgggtcttcattgtatgcttgccaagataaaccaccatgaacaggaacccgaaccattttcatcctagaagtttgagcaccaaccctggctgtgttgtaaactgtgtttttgcagtctgggagaatactaatagaccacggagggagattgtagtgattgttcccgaaagaaactttggcgtaagattttggattataatttgctaagaatgcagaacaagctccagattttgatttgtacctcggccgcgacc

SEQ ID NO: 530 - DNA, 360 bp, Arabidopsis thaliana
tttttttttttttttgaagcaagaaggtttgatatagaggttaacgcaaacaagcttatatatacaacaatgggaaacagcaaaacattggaaaaaggtaaagagataaaactttcaagggaaaaagaacatagttgtagagattcagaaagtgatgtttcactggttagattttggttcaatatctttaagaagaccaactacttgctgcatacttggccgctttgaaggaagatcagctgtgcagaggtaaccaatcttgagagcttcttccatctgttcttctgagcctgtctcttggatttttggatcaatagcttttgatgcttgattcttcctaactaaacttctaacccaact

SEQ ID NO: 531 - DNA, 360 bp, Arabidopsis thaliana
  misc_feature (1)...(360): n = A,T,C or G
cctctagagcggccgcccttttttttttttttttttccaagcaaacacatataaatggatcaaatcatcaaaatgcaaacactttgtggttacaaggatcacactctcataaaataaataaatcatcatctannacataccaaaagaatggagatttcttgaagatcatctttaacaagatagcaactaagtggtagaaagctagaaagaaaacactacattgtggtgaaanaatatccaaacgaaattnncacaagccctcctaagtagctactaaagatcaagaagcaaaacactaatattgtcaacagaagaagattagctacattctctgatcaaagattgggctacgtcgtcaag

SEQ ID NO: 532 - DNA, 360 bp, Arabidopsis thaliana
  misc_feature (1)...(360): n = A,T,C or G
ctctagagcggccgcccttttttttttttttttttttttttttttttttttttttttttttaaccaataattatcagtggcattattttttgaaagtcaaaattgtaacattttgttcaaactgtatgaatattataaaataaaagaaaactcaatacaccgatgctttcctcgcccggcaaaaactcttaaaactattaagaaaactccaaaaaaaaagtttcgttcttttttcaaagcatcatttgcagattgcagtatccgtaatggttttacctgaannnnnactggtaaaaagacagaaacttatgatctcttctgtcttggatctttatcatatgtcgagaagaagcctctgag

SEQ ID NO: 533 - DNA, 360 bp, Arabidopsis thaliana
agttacttgctgttgcgcgtcacatagccaaaacacttggccacaatgaatccatggccgatgatatcttacagatcttctccaacttcgacggcagattttctcgcgagaagctcgccgaaggtcaagctggagaagatggatccggagtcgccacactcgagcgagctctaaattcaatagacggtcagatctctcgctttgttgctgcggaccaaccaatttgggctgatcctgcagattcagctgctttcctcgacacaatcgatgagctcgttgcaatcattagagagtggagtcccatggcttcagagaaacctatcggcatctgtctaacacgcgccgacgatatgatgcagc

SEQ ID NO: 534 - DNA, 360 bp, Arabidopsis thaliana
  misc_feature (1)...(360): n = A,T,C or G
gagctcaacggtgatgggatcttggcttccccagtattgcttcctcttcatcttctactgtcactcccacaataccaatcacttttcctgatatcgttagctgcattttctccgaaactcactctcttctcctactcaggatttgaacttcttacgttttgaacccggctgctcagagtaacttgctctggtttttctttaaatcaccaaaatgggttcgagatacccatctcatcagctcagcaatgggcnatttgtgtctggtcggcctgagcaacccaaagaangnnntccaactatgagtgcagtagccatgccttacactggtggtgatatcaagagatcaggagaattggggaa

SEQ ID NO: 535 - DNA, 360 bp, Arabidopsis thaliana
  misc_feature (1)...(360): n = A,T,C or G
cttattttgctataattagaagaatttgtcacttcacaaaacacgagagtgtataggctttttatttccaatctaatttacaatgacatgactctataacaacattaataatacagtggcgtatacaaagcacaaataatttgatttacagtagaaagaaattagaaagtgaaagtggttcattgccaaaaggcccaaaacattcggatgtttcttggagatcccaaaacagattcaagaaattccannnnttttaccaagaagccagagaacaagagacaattcaagtccgaagattgtatggagagtacctctatcaagtgtaaacccatacactgtgattcctgcgctgttattctc

SEQ ID NO: 536 - DNA, 360 bp, Arabidopsis thaliana
cctctagagcggccgccctttttttttttttttttttttttttttttttttttttttggaaaccttagcctttattatatcggattttttttaaactactaaagttttaaaattgccaaacgtcttaaatacataaactacacaacaatatgcataaaaacatgtcatgcatctactaatgacaagggaccaacaaagctcctagagaatttaccacttacgtgatgacacctcaaacaacaatcaaatactcatactaaaatttcaaattctcaaactaaaatttaaatttcctttcccgtcgggtttaacaatgacccgacataagaacgagtcgggcgctccggaaccaaactggca

SEQ ID NO: 537 - DNA, 360 bp, Arabidopsis thaliana
tttttttttttttttttttttttttttttttttttctttttttaatcataattgaaatccatttaaattttacagtcgccattacaaatttctgccaagattgtgttcatagttatttcgtatgcaacaggaatctaggaaatatagatagaagcaaacaatacatattgaaacactagtgcttgatctgggacaacatggtcctgacatctttactgttcggcctctgttttggatcatccaaagtacagtaacaggcgatcttcagaaccagaagcatctgttcatcgaatccttgatccatcaacttcggatcaatcgcaacggacgcgtgggtcgacccgggaattccggaccggt

SEQ ID NO: 538 - DNA, 360 bp, Arabidopsis thaliana
  misc_feature (1)...(360): n = A,T,C or G
gcggccgcaacagattatagttacacgagttaagccaaacatgttacatatacagccactttctaaactaatctaaaactgaactatcatataggagtttgatcacatttactcttttacccgctacgacgttggaacttacctttcccgtctttgatccatatcgttgaccgcgttcttctcacatggtctgtgaagagacggtacctctcatactcaagcctttgggtaactatcccatttagtagtaactccgagctatatacctcggcccctctttccagaaagggtatacagatagcgcgannntcttcacatgataagaccagaagattctctgggaccttatcttcgcttagg

SEQ ID NO: 539 - DNA, 359 bp, Arabidopsis thaliana
tatttcataaagtcatgtagtaatatattctccacaaatgattgattacaagagcaaaataaaccacacataatttatatgatatgataaagtaaacactcacatatacaaacacacataagatatctcacttctgtttcaagaaaaacaaaagtctagaaacaacattttttgtaaaataaaacaaagtttggaaacatttttcatttggttcttaaaacttagagaggtttgacattgaacctgtaaacgagcttcttcttcttagaggttgggttgtctactgtgagtaaaaccttgccaagctcattcactttgaagctatgggttaacaccggttcatcggatggtctcatctt

SEQ ID NO: 540 - DNA, 359 bp, Arabidopsis thaliana
ttttttttttttttttattaaacatcggactactttcttttctagtccaaaaacaagagcactgatacatttttattcgttaaaatgagaacatagtactcattaaaacaaaaagggatattgcaatgaaaaataaccattggtcacgccatatctaccagcagaaacgtcctaatgatatatatagcatcagatgtgtttcgttggtgcaagaacgaggtgttctttcttgtgcatagcgagtccagtcatgacgtccatctttatatcctctggtttaatccctttaggtagactccagtcaaatttgtagagaaggttagcgaaaggtatctctaccattgcaatcccaagatgca

SEQ ID NO: 541 - DNA, 359 bp, Arabidopsis thaliana
ttttttggtaaaataattttaaaataaaatttccactgaatacaatcgagatttggaataatacatatgtaatgtaaccccaaaaatgacaaaaaaacaaatacagcaaagtttgctcagaactagaggagcaaacaccatagcgttttttggggtggaaaacgacacgcagttatagtccaacactcaaaaggatggatccatgttggaggagggtatatatataggctaaaaacatagcagtcccttctttttactagctgaaatcaaatatgaagacaaaacaaaaggtataataatataccacaaagacaagtttacaatcatcgcaccacaaatcttagccagccattttgtct

SEQ ID NO: 542 - DNA, 359 bp, Arabidopsis thaliana
agcggccgcccgggcaggtacatatatactacctgatttggacatcaaatatagcaaaaacctcggtttctgcaggcaaccatcactgaagagccttcaaaatgaattgatgacgataaacgtagagacaaaaccttttgatttcttggtttagcagctgcaaaccggtcgatttttacttgtaaatccattcatttgctcttccccctgtcgaatccatgtctatgaaaatgctgacagccttccctatccgaggtcgctccttcgactttgctaggctgctacggatatgtgagactgctccccagcatttcaacatgttggctacatcgtcaagtctaagtatatattcttcttcg

SEQ ID NO: 543 - DNA, 359 bp, Arabidopsis thaliana
agtatgctcggctattgaaactgtttgaggaagatgatgaactcgaggttgaattaggcctacgtgattaagaagaaagcaatgtctgaggtgtatgagatgatcatacaggcattggaaatattgaagtatatatatacttaagctgatgtaattgtgattgatcatttcgaattctctgggtgatctcgccgtttgaggctctggagaaagtgtttcttcattagcgttaggtcaattattgtaaaacatttaaatttctcaacttcttccatgttctttgatttgttgcttgtacaattttgatatttgtctcagatcaaccaagaatcatacatatttccaaaaaaaaaaaaaaa

SEQ ID NO: 544 - DNA, 359 bp, Arabidopsis thaliana
aatgtcgttgataataatagaacactttctttctctctctaaaaagcaaaagtagtctagtcactgatttcttctaatcctccggtggagtgagagatgatatctccgacgttgtttcctctcctctgcgctttatttctatgtcttccagtggctgttatcttcacagtccagcgagaactcacctgcgttatctcgccggagtttggtttccgctctctttccgtcttctctctttactctcgaaatgtccccgactcttcttcttcttctccggcggttcggattcgacagccgattcccaaagaagacgaccctcttcttcgactatcttctcgggttaacccgaatctacctcc

SEQ ID NO: 545 - DNA, 359 bp, Arabidopsis thaliana
  misc_feature (1)...(359): n = A,T,C or G
gcaatgcagagaagcgtttcttgtatgatattgttgctaatggtcgaaatgggattgatgtggacaagtttgactaccttgtccgtgattctcgagcttgtggactgggatccaattttcaattccaaagactgacanagacgatgagagtcctggacaatgaaatctgctnnngcgccaaggagtatcttagtgtccacaagttatttgcaactcgagctgatctttatcgaaccgtctacacgcattcgaaagtaaaggcgatagagctgatgatagtagatgccatggtcaaagccaacaatcatttggaaatttcttctatgattaatgacccatctgaatactggaagttagac

SEQ ID NO: 546 - DNA, 359 bp, Arabidopsis thaliana
  misc_feature (1)...(359): n = A,T,C or G
caccgggtcaagaagattgtgcgcatttgttacctgaagggaaacctttagatcttttaccggagagacaagagatgagtgaagccattatggcttctgaaatagagacagggattggtctgaaactnggtgaggatttgactnnaannttgtttggggtttctattggggtcaagcgagctagaagagaagaagaattgggtgctgcagaggaagaagatgatgatagacgagaagctgctgcccaagagggagaacaaagttctgatgttaaggcagagccaatggaggagaataactccggtaaccataatgggtcgtggcttgaactcggaaaatgaaaaacacttgccgattca

SEQ ID NO: 547 - DNA, 359 bp, Arabidopsis thaliana
ttactctttcaaaaaaggagaaaataaatgttattttcttctcttcactcacatgatgaatcaaacacagataaaatcaaacccatattatttaacaacaatcaaaagactaacaagaaaggatgagaaaactcatcaggtgctggaaggaacaccgagatcgtctgaagagtaaggatgaataaaagcattgttcatttgccagaccgtaaacgacgccgtaacggtcgcatcaatggcgttattgaacaagaagagcttggtagctccatagatagcttttgtgggatatactcttgaggtaatacatgatcttccaccttgtgcgaatccttctacgatcgaatgatcaaccaaga

SEQ ID NO: 548 - DNA, 359 bp, Arabidopsis thaliana
tcgagcggccgcccgggcaggtcgagccacttcaaatgcaatgaggcgcctcccttgctcttaagtaacataggttcagagcaaaacaactgttggtcagtttggtttgagttgtgggttaagagaatcaaagacgagacagtttcagttatttgccagttttgtgaaatcctctgctctcctgtcaagtggtgtgtgggacaagtaattgcttttgaaagtatcgaaactctttaatttatcgagcataacgtttacgatttgaaatacaatataaatttttgtatttagaaacatatattctctctctatattaagatgttgcatccccaaaaaaaaaaaaaaaaaaaaaaaaaaaa

SEQ ID NO: 549 - DNA, 359 bp, Arabidopsis thaliana
  misc_feature (1)...(359): n = A,T,C or G
agagttttagcttgatagattcaaatggatgcgagaactttcatgaatagagagagatagatacattgttggatttatataagaatagatgaaaacaaacaaagttcttcaccatttccagaaaacattggaaccacacttgtacttgnnnttgccttcgcattccaaagcaatatcttctgagataaatggaactttcttttgcttggcaagatctttncagccagtgaaattctcagggaacttgcagcttccgaattgaacagtgaatgctctcgcaaagtttgctccacttgttgccaatctcttcttatcattaagttctttgttggttttgctcctctcgaggtattcgtcaa

SEQ ID NO: 550 - DNA, 359 bp, Arabidopsis thaliana
tttttttttttttttttttttttttttttttttttttgagagacataagatgatgaacattaagaaatgtatacagtttcatacagcaaactgaaccaaacaaaaggtaacaaagaaatcaggaaacatgtgtaatcatgatattatttgaaacaacaaaagcaagttcacatctccacgtcaagaattattgggaatctatagacttgaagtttaagtgtttaggtttcgaggaacaggagtgcacttaagagggtgagccatggtcaaggtcattgttccaccctccttcatgttgattttttctcctttgattatccagtcaaagtgttgcaccatcattccaattacacttccta

SEQ ID NO: 551 - DNA, 359 bp, Arabidopsis thaliana
ccacgcgtccgagagaggcaattcccaccaagtgaagtagcccaggttctagactcggcagtggcgagtttacagccttgctgctcgcagaaccttccgatctatacagagattcagaagtgcatgggaatcataagaaaccagattctagccctcgtaccctcctaaagtaagaatcctaaaaccataacttaacctttgtgtctcttcataatgcttgtttctctttgtaaaatcaatatctccttatagaaaatccttttatataccccatttatttggagtgactcacaacagtttctcgatttcacatttatttatatgtaacacatcatttgttaaaaaaaaaaaaaaaaaag

SEQ ID NO: 552 - DNA, 359 bp, Arabidopsis thaliana
ttttttttttatttcagtggaaaatattgatttcttgataagtttaaaataatgttttatgagagaaacgaattctattaacagtacaagttatatagtgatttctactatgatctgacaacacctgtattcgcagcgacatacaaatactagaacttcttaccgttcttgaggtttctgacagccatcacaagttgttgtctttctccttctacctctgcaaatctcaggcttatctctgaatatctctcttccatttctttcaactctctctccattgaactgtttttgttcttacaatacgccaattcgtctgatagctttgatagattctcctctttgtgtccgttttcttgtga

SEQ ID NO: 553 - DNA, 359 bp, Arabidopsis thaliana
ttttttttttagacaaagaagactcatcttgaattcttacacaacaactctaaccatatgatccaatacaaatttataaaccactataaagattcctataaagatcccaacattcacaagtgtctctctgtgtttgtatcccaaaattcaagacaagaatctggactatctttcaaaatcagagacaaaagttacaaggaaaggacctgcaggaagcgactttggtatatcaactccaaacaagagcctttgtgtttgttgtctgtaagttatgaaaacatcaagaccttcttgtagtttagtttcaccttctcctcggcttgcggttcttctgctgtgtcctccagtaacaagcaagc

SEQ ID NO: 554 - DNA, 359 bp, Arabidopsis thaliana
acgcaaagcctcttgtactgaaaggtggaaacattgagtttgaaaatgtacacttcagttaccttccagagagaaaaatattagatggaatttcctttgtcgtaccggcaggaaaaagtgtggcaatcgttggtactagcgggagcggcaagtcaacaattcttaggatgctattcagattcttcgacacagattccggaaatataaggattgacgggcaagatataaaggaagtgagactagatagcctccgaagctccataggagttgtgccgcaagatactgttctcttcaatgacacaatatttcacaacatacattatggacgtctctcagctacagaagaagaggtgtatgag

SEQ ID NO: 555 - DNA, 359 bp, Arabidopsis thaliana
  misc_feature (1)...(359): n = A,T,C or G
cctatcaacatcaatgtgaaaccaaaatcaagcctgcagttagctgtctccacatttggttatcaaatactacagtatcctcaatttgctgaactttgctgggtgacatcaaagcttaaggaagggccaagtgcagatgtttctggtccttggaggggatggccatttaattcgtgtatcactcgcccttgtaattcctcggagnagactattacttcttccgattccaacaatgttaaaggaaaagattccactggaattgtcagaggtcttactgctgttggattatcagcgtatagaggaacctatatatcgctgagggaagtctcatttgaggtacggaaagttctggagctctt

SEQ ID NO: 556 - DNA, 359 bp, Arabidopsis thaliana
ttttttttttttttttttttttataagtatatgttctctattatacttgatccaatcatctggaagtccaagaacaattcttgaatcaatggacaaaacaatacatgtaacatgatgagtatgggggtctattctaagctacaagccacatgaagaatgttggccaaacagtgagtgcaatcgaagccaaagagtaagtccagagcataatcactgagcattcactctccccagttccaaataactgagtaattgtacctagattcatggctggtgggacagcatattgaagaagaagaacgaattggtataagggctctgatgtaactaaatccaacttatatgctcctcttacgatt

SEQ ID NO: 557 - DNA, 359 bp, Arabidopsis thaliana
cctctagagcggccgccctttttttttttttttttttttttttttttttttttttttttttttttttttttttttttttttttgtcattctaaagtcctttcggagtttagtaataaaagacgtttcaagtaaacataagtagaaactctcttgagacaatcatgtcaacatctctaaactaatggtcaggatcatctttgtctaaagaagaagataagaagcttagagatgaaaccatctaagtctccttcaagaaccgagtcaggatcagagacctcgtagtttgttctcagatccttcaccattctgtattgatggagaacataagttcgtatctggtttccccagctgatctctg

SEQ ID NO: 558 - DNA, 359 bp, Arabidopsis thaliana
  misc_feature (1)...(359): n = A,T,C or G
gccgcccttttttttttttttttttttttttttttttttttttttttttttttttttttattcattattcagtctatctgatatattattcatcattattacatatgtgtctgatatatggtttcaatctagacgaaaccaagttttaaataaagggactatgccattttaacaatggaatagagccctaattttaattcactaactgggatatgttgaacggactagctataggtccgttaaacgctgcgttnnnaccacagtatttatcacttccgtagtatgcacgttatcccagaatatgaatttgtttctgtctggacaaaccggtccgttcgccgcacaaagttcttcacccg

SEQ ID NO: 559 - DNA, 359 bp, Arabidopsis thaliana
ttaactctcaaagactgtttgtttcatatttcattcaaaagctatttgttccaatactttctatcggtgtccaattgcacaccaatgtttaatgaactagcaaacaagccagattcgaaaaagaatatacaatgaaagtagcattctctatcacaaatttcaggaggaaaaaaaatgaatcttgcttgagtaggagacagatcaagaagaagtacaacaagtgctggtcttagcgggaatctcctgtccagaacctgggatgagaatcttcttaccagccaatgaaccggggttatttgagtcgccttcagatgcaagattcttcttgttcacggtattgtatatctgagtcattagag

SEQ ID NO: 560 - DNA, 359 bp, Arabidopsis thaliana
tcaaacctatgaattgtcctggtcactgcttgatattccagcatagggttcgctcatatagagagttacctatgagactggccgactttggagtgttacaccgcaatgaggcaagtggagcacttagtggattgactcgtgtccgacggttccagcaggatgatgcacacatattctgtacaacggaacaggttaagggagaagtgcagggtgtgttggagttcattgactacgtgtacaaagttttcgggtttacctatgagctaaaactttcaacgaggccagagaagtaccttggagatttggaaacatgggataaagctgaagcggatctcaaagaagctatagaagcttttgga

SEQ ID NO: 561 - DNA, 359 bp, Arabidopsis thaliana
tgaattacgctagaaattacctagctgaccttctcgagccttgcgtgcgtcgcgtgatctacctagattccgatctaatcgtcgtcgacgacatcgcaaagctctggatgacgaaactgggatcgaaaacgatcggagctcccgagtactgtcacgcgaacttcacaaagtatttcacaccggcgttctggtccgacgagaggttctccggagctttctccgggaggaaaccgtgctacttcaacacgggagtgatggtgatggatctagagagatggaggcgcgtagggtacacggaggtgatagagaaatggatggagattcagaagagtgataggatttacgagctgggatcattg

SEQ ID NO: 562 - DNA, 359 bp, Arabidopsis thaliana
  misc_feature (1)...(359): n = A,T,C or G
ggatgttatattctacggccatggtcaatggccatttgggagattatgcaaattttctttgatgcggaaatcaagaaaatgaaggtcaagaattgctatttccctctgtttgtatctcctggtgtcttagaaaaggagaaggaccacatcgagggattcgcccctgaggttgcgtgggttacaaagtcaggtaaatctgacttggaagtcccaattgctattcgtccaaccantgagacagtgatgtacccttactacagcaagtggataagggggcaccgtgacttgcctttgaagcttaaccagtggtgcaatgttgttagatgggagttcagcaaccctaccccatttatccggag

SEQ ID NO: 563 - DNA, 359 bp, Arabidopsis thaliana
ttcttgaccctaaagcatcaccggccttgatggatctatccaccgcagacgaagaagatctctatggccgcctcaaatcgcttgaacgacaactagagttcaccgatatccaagaagaatatgtgaaagacgagcaaaagaatctcaaacgagagctgttacgagcacaagaagaggtcaaacgaattcaatccgtgcctttggtgataggtcagttcatggagatggtagatcagaacaacggcatcgtcggatctactactggctccaattactatgtcagaattctcagcacaatcaatagagaactcttaaagccttctgcttccgtcgctcttcaccgtcactccaacgccctt

SEQ ID NO: 564 - DNA, 359 bp, Arabidopsis thaliana
  misc_feature (1)...(359): n = A,T,C or G
gtgtccaagattaatgacatggagaatcaactgattagcttgcgtttccttttgaagcaagttgaccaggttgaagaggatgatattccaacctttttgtcagacaccggttacgcgtccaggcaagagctagagtctactattacgaaagtgacacagtcgcttagaaaagcaaggggtgagccgaagaatgaaccagctgagtatgaagaaaaccctgattctcttaataatgaaaagtatccacttatgaatgtccccgatgatattcttactcctgagcagcttnnggacaagnnnaggcaaatgtttcttaaaacaacagcagagggccggctacgagctagacaaaagcgtaa

SEQ ID NO: 565 - DNA, 359 bp, Arabidopsis thaliana
gaacgatcggggaaattcgagctcggtaccctcgagcggccgcccgggcaggtaccagcctttccaatattgctctgtttcctctagacgtgttcggtaaacgtagcaatgctttgaatcatcatatttgagagttgtggggatagagacacgggctgaatcaatgtttcttaatgaccctcctctaacgctgtattcaattgctttttcgatgctgggaaaatgttgcattctgtttgaaagaattttctgcatgtgaatcaatgaggaaatagcagtacctcggccgcgaccggcgcgccggatccttaattaagtctagagtcaattctcgatacccgatccactggccgtcgttt

SEQ ID NO: 566 - DNA, 359 bp, Arabidopsis thaliana
tgaacgatcggggaaattcgagctcggtaccctcgagcggccgcccgggcaggtactgagatcttctgaaatagcagatttaaaatcttcaaacagccacgaggagaccatggaaatctttcttgacttcatagcatccttcacatagctcttatcctcatgatactgcttctctaattcttctgtgacatcttcaaacaagtctttcggagttgaaccagatgtattagatgcaacagcttggtattggggcaagtcttttaactgaatgcaataatccaaccagtacctcggccgcgaccggcgcgccggatccttaattaagtctagagtcaattctcgatacccgatccactggc

SEQ ID NO: 567 - DNA, 358 bp, Arabidopsis thaliana
  misc_feature (1)...(358): n = A,T,C or G
tgagtttatgttgggagatcgatgagataaaattaccatcatccgtttactgaagctgcattcttattataggagtctgatgacatattccacactccacaacagtttttgtaactaattgtaacgttgatactttgtcaaactcttgaacacatgatcatgatggtgcgccattgttatcgttcatctcagcttaacacaatccttggtatatcagttgcattccaaaggattcttgttggaaccttcttggctctacattcgctcgtaaacangtttctcacacttgatgagcatatctgttgggngccaagctggtgcggtggggataccaacccatccaacaagtgcatactct

SEQ ID NO: 568 - DNA, 358 bp, Arabidopsis thaliana
tcgagcggccgcccgggcaggtagcagttcggagaaacaatggcggtagaagacactcccaaatctgttgtaacggaagaagctaagcctaattcaatagagaatccgattgatcgataccatgaggaaggtgatgatgccgaagaaggagagatcgccggaggagaaggagacggaaacgttgacgaatcgagcaaatccggtgttcctgaatcgcatcctctggaacattcatggactttctggttcgataatcctgctgtgaaatcgaaacaaacctcttggggaagttccttgcgacccgtgtttacgttttcaactgttgaggaattttggagtttgtacctcggccgcgacc

SEQ ID NO: 569 - DNA, 358 bp, Arabidopsis thaliana
tcgagcggccgcccgggcaggtacttggacattttgtatcatatgtctgcttcttttccaagttttgttgccaagagatcagtgggcaaacttcctcttgttggcctcattagcaaatgccttggttgtgtctatgttcaaagagaagcaaaatcgcctgatttcaagggtgtatctggcacagtaaatgaaagagttcgagaagctcatagcaataaatctgctccaactattatgctttttccagaaggaacaactaccaatggagactacttacttacattcaagacaggtgcatttttggctggaactccagttcttccggtaatattaaaatatccgtacctcggccgcgacc

SEQ ID NO: 570 - DNA, 358 bp, Arabidopsis thaliana
tttttttttttttttagagaaaaaatagcaatcaagttcagaggtaacaaacagaattgcatcaagttttgatttagaataaacaaaaaggattcttaagtttttagagttttaaacagccgaatgaaacatcaacgaacatactctcgcgattctgatctcttagaccgcttgtactcacgttcatatctgaagtcatcttcctccattttatcgtagcgatgactgtaccggtctgtgtccccttgatcgtcttcatagtagccacgagtttcttctggctcgccacggtactctgcatctctctcacgggaccgaccaccaccctcatgctcatattcacctccttcataatccc

SEQ ID NO: 571 - DNA, 358 bp, Arabidopsis thaliana
tgagcaatccgaggagccaattgtttgttagatatggttttctggaaaggagcaacaagaagaaatcacagaggctggtcttggcatctgctgaagatggagtagctattaatggaagtcctcagccaagatctagtagtaatttggaggacatgaggactagtttcaccggatcattacaagacgaaaacaattctaatggacttaaccagtctttgcatgatgctgctagatctattgaattggctgttaaagagaagattactccgtccagattttcgtggtttccttcgacttggcttggtgctgataaatatgcatgggtgaagactctttcgtatcaggcttctctgtacct

SEQ ID NO: 572 - DNA, 358 bp, Arabidopsis thaliana
  misc_feature (1)...(358): n = A,T,C or G
gagctctatctactcaacttcaccatggaccggaggctcaagaaatgctcgacatccaccgatgttgaatcagttcatgatgttagtaaggtcacggatcctttgcagaaagctaagagagagttggataatgtggaaatcaaagaaaaacagaagaagcagaagaaccaaaatgaaacatctgagaaggaaactaaaaaattcagcaccgtttacgaaaagtttaatgatactattaaagaactagacagggtttctggaacatgtcccatacgacctnnnattccattcacgcccccaaaggaaaaggtggaaccgatatatcacaatgagtgcaatttcgatgataaagctcatc

SEQ ID NO: 573 - DNA, 358 bp, Arabidopsis thaliana
tgcaaggatgggaaattcaaaaccactccctacaatttcttgtattatcgtttcagtcttgtatttttcattctattgcataacaccaacttcttcatcagcctccatccaagatcaattcataaactgtgtcaaaagaaacacacatgtttcttttccactcgagaaaacgttattcactcctgcgaaaaacgtctctttattcaacgaagtccttgaatcgacggctcaaaatctccagttcttggcaaaatccatgcctaaaccgggattcatattcagaccgattcaccagtctcaagtccaagcttccatcatttgttcaaagaaactcggaattcattttcgtgttagaagt

SEQ ID NO: 574 - DNA, 358 bp, Arabidopsis thaliana
tcgagcggccgcccgggcaggtgtggattctcaaaattgaatgaagcaacgaacgattcaacatcaaatctagctgaattattgtttcgcgttgattgattgatccggagaaaggcgatgacatcgcctggatcgaagaaagttgttaccaccgacgacggatcggagaagaaagtttccggcaatctcggaaaagtaagtttttccggagatcttaatcatagtggaagccatagtggaagccatagtcgtagcagcagcagcgccggaggtggtgaaggaggaacgtttgagtatttcggatgggtttatcatttgggtgtgaataagatcggtcatgagtacctcggccgcgacc

SEQ ID NO: 575 - DNA, 358 bp, Arabidopsis thaliana
ggtcgcggccgaggtacaaaaaagacgccgctcgtctcttcagagaatttcaccttctagggtttgttcaagagaagtcttgggaaaatgagtcgtggaggtgcagctgttgccaagggaaagaagaagggagtttccttcaccattgattgttcaaagcctgtcgatgacaagatcatggagattgcttcccttgagaagtttcttcaggagaggatcaaggtcggtggcaaagctggtgcacttggtgattctgtcacaatcacacgtgagaagagcaagatcactgtcactgcaaatggccaattctccaagaggtatttgaagtacctgcccgggcggccgctcgattctggcg

SEQ ID NO: 576 - DNA, 358 bp, Arabidopsis thaliana
ccacgcgtccgaattcagatgttattgagactgtagcagaatctaaaccgaaacgagccccgagaaaagctacacttgctactgaaacaaaggcgaagaagaagaaacttgcagcgggttctacagttagagttttatcagggacatttgctgaatttgttgggaacctaaagaaactaaaccgcaaaactgcaaaggcaacggtgggatttactttgtttgggaaggagacactagtggaaattgacatcaatgaacttgttcctgagattcaatcttaaatagtttgttcactagaatgtgaattttttggtttgaaatataaatccatgatcacttcacaaaaaaaaaaaaaaaa

SEQ ID NO: 577 - DNA, 358 bp, Arabidopsis thaliana
ttttttatttttctccttctccttcttcttcaccagctctcttctccttctcctcgcggcaacttccgcaaccgcatctacagggaatgttactagtgggttgagatatgacggatgtgctcctggagacaccgttggagaatgtataaccgcaacggttgaggaggaggatgaggaaggagttgaggcggtagtccggcggattctacaacaaagaaagtacttaagctacaaaactttgcagaagcagccaacttgtgatggtagaattgctggtaattgcatagggactgttaatccaaaaggtgcaacttgtacttactaccagagatgcaaacgtgccgcatagttatttatc

SEQ ID NO: 578 - DNA, 358 bp, Arabidopsis thaliana
tcgagcggccgcccgggcaggtcgcgagattgctacaaattagagtagagagtaatttcaatcagcaataaattaaatacctggaattgctgattattgagagggaaatggaggaggaattgatacgaagatcagaaccggagtctctagtctccgtcactgtagctaggttcatgagtacgcttctctcagctcgccctaaaaagctacgagagtctatttctcgtctaactcctgattctcaaaagggtgtctcaggctctatcgatgaggcactctggtttttggaaaagtgcgttatagacgctgctgagagagacgaagccatgagtgaaattcttgtacctcggccgcgacc

SEQ ID NO: 579 - DNA, 358 bp, Arabidopsis thaliana
aattcgagctcggtaccctcgagcggccgcccgggcaggtacgcttttcagtaacaaggtccatgcttttgttgagtatgagattgttgagctagccgagagagcagttaccgagttaagtgaagcgggaaattggaggagcggtcttaaagtccggttgatgctaaagcatcagacgaaggaaccaaaacaaggtcaagggcgaggaagaaaaggacatgatgcagatgtagaacatgaggaagatgatgctacaacatccgagcagcagccgattgagaaacaatctgatgactgttctggggaatgggatacacatatgcaagagcagccaataggagaggatcaagggaatgag

SEQ ID NO: 580 - DNA, 358 bp, Arabidopsis thaliana
tttttttatatatatatgtattactttttatttattttcagatattttctttaagaatggatcaagttgtgataaatatccaaaatcgatggataagactaacagcaaaccaaatttaaggaagtgagacagtggacccactccgactccgaggttccaatgccctaatcatcacctttacctccatctccttttctcaggttctcataagtgagtgtacttcaagctgaaattgaaaggactattcaatatcttcatctgttgttaccaatctcttcttgtgtctgctaagtggaaactctttcaacagcttcatcacctcatacgtccttatctctcttccaaggtagaggcaaag

SEQ ID NO: 581 - DNA, 358 bp, Arabidopsis thaliana
gcggccgcaaagaaccaaatccttcactactctgtctcagctttcgacctctctcttctcattcctttgcaacttctcacttctcgaattccttctcttcaaaatcagaaatggctcaagtggttgctaccaggtcaattcaaggctcgatgttatctcccaacggtggatctgtgtctacaagatccgagaagctattgaaaccagcgagttttgcagtgaaggttcttggcaacgaagcaaagagaagtggaagagtctctgtaagaagcagaagagtggttgatactactgtgagatccgctcgtgttgagactgaagtcattcctgtttctcctgaagatgtgcctaacagaga

SEQ ID NO: 582 - DNA, 358 bp, Arabidopsis thaliana
tttttttattgcaacatcacatatataatgtacagcaactcgtcgtcccaatgtttttttgtttgttttctatgtttgacaataaatgagagtcttgagagaaataagaacaaaaaagggtcaagaccgacccaaaccggttctacccggtactgttgctctctgaagtaccctgctcgctctgtcttcgtttctccctcaaactctctccccacatcttagcctctgcaaccgcacgctccctattgatatctcggttcaatatccgagctgtctctctcggtgaatcttctttctctgaaccttctaaatcgaatttacttcccgagccacctccatcgtcgttccttgttattaa

SEQ ID NO: 583 - DNA, 358 bp, Arabidopsis thaliana
  misc_feature (1)...(358): n = A,T,C or G
cggccgcccgtcatcttcgcattattggttcttcctttttccctgtaagctcgacacgtggattattcctctgctttttttgttttcccttttcntgaagattcgtttcctgtatctccgtgaagacttgatggagttagtttcttaaagtagctccttcttagatccgagtttcgatttgcttcactggtgaagaattagtgattgattcaactagatactatcgatttcgttggatttgtactgaaaacttggctgattntnnngattctgtcttgctggtgaagtctcaagctacttcgtgattagaggaggagatctggatttctagttttagcaattcatttgacttccgagt

SEQ ID NO: 584 - DNA, 358 bp, Arabidopsis thaliana
ttcttcttcctcgtgttttttttccataacattccctctgaatcttcgttttttattggaaagaaacaatctaatccaagttcaagggttttctcatcttcagtggctgaagttatgagctttacaagatgggaagtgttctttggtctctctgttttagccttgacaatgcctttctcagctggagttactaatctacgagatgtttcggcgattaataacttgtatatcactttgggagcaccatctctacatcattggcttgcttttggaggagacccttgtggagaaaagtggcaaggtgtggtgtgtgactcctcaaacatcacagaaataaggatacctggcatgaaggtag

SEQ ID NO: 585 - DNA, 358 bp, Arabidopsis thaliana
tcttataacacatcttcttcctctaaagtttattttcttaaacttattacaaaaaacatgatcttcaaaagttgatttaatctctttttatccatcttcttcttcatttctcaatatcaaacttttctttttttgtaagcttaacataaaccctaatattttcttgatttttttcaagaaaataaaaacataaagatgcttgaagttagatcaatggatatgactccaaaatcaccagaacccgaatccgaaactccgacccggatccaaccagctaaaccaatctctttcagtaacggaatcatcaaacgccaccaccaccaccaccacaacaacaacaaagtcacttacaaagaat

SEQ ID NO: 586 - DNA, 358 bp, Arabidopsis thaliana
tgtcaaagatgaagaattacataatttagccagggaacttcgttctcgtgactcaatgataaaggaaatagcagataagctatctgagactgctgaagcagctgtagctgcagcatctgctgctcatacaatggatgaacaaaggaaaatcgtttgtgtggaatttgagcgcttgactacagactcacagagacagcaagaagccacaaaattaaagctcaaggaattggaagagaagacctttactttgagtaaggaaaaagatcaattggttaaggaaagagacgctgctctccaagaggcacatatgtggcggtctgagcttgggaaagccagagagcgtgttgtcatacttgaa

SEQ ID NO: 587 - DNA, 358 bp, Arabidopsis thaliana
catccattttcgcctccaaagccagaagacattgcaaccatatgctacacaagtggaaccacaggaacaccaaagggtgttgtgttgactcatggaaacttgatcgcgaatgtcgctggttccagtgtggaagcagaattctttccttcagatgtttacatatcatatcttcctttggcgcacatatatgaacgtgcaaatcagattatgggggtgtatggtggtgttgctgtcggtttctatcagggggatgtcttgaagctgatggatgattttgctgtgttaagaccaacaatattctgtagtgtccctcgcttgtataatcgaatatatgatggcattacaagtgccgtaaaat

SEQ ID NO: 588 - DNA, 357 bp, Arabidopsis thaliana
agtctttctgatgaagaaattatcttttacaagaccaacaagtatccaatggcctcgtgatattattggaacatctttcgtttcttaaagtcttgtttagttgaaaactctaaaaaaaacatctctacttacttgataccctgattgcattctttacgctattattgatgtgaaattgtttagagtcttgaaggcattcctccagcgacaaccaaagtttctccagtgatgtaagaagaatcatctgatgctaagaaagcagccgcagcagccatgtctcccgttgttcccaacctgttaagcagagtcttctcttcaataccttccctcacttcagagctaccggcggacgcgtgg

SEQ ID NO: 589 - DNA, 357 bp, Arabidopsis thaliana
tttttttttttttttttttttttttttggaattcgatataagttatataagtatctctgataatgataattaagcaattatcatgcagaacattaagtattttacaggaatgaaaaaaaaaagcaggcgagccaattcaagtttctcttctcatataattcgattggcatttttaggaaaataaaattttcatcaacaagaaaatggagaagaaggcctgactgcagttttttcatcttcctcttgtgagagctttctcagcagtttccatctcttcaagaatcctcgccttcctcttcgccggaatcggagccgtcggaccaaaactcacataatgacctgaaacagcattcaacg

SEQ ID NO: 590 - DNA, 357 bp, Arabidopsis thaliana
tcgagcggccgcccgggcaggtcaattgagtgccactaccgagcgatgcagcaaataaagaattgtgagtagggaaccgaaacacatcgccatgaatgtacttccatccagtttcctcttgatcatcagcagcttcctcatcttgagcatacttcatgaaatcgttcttgaggactcgcatcaagatagttgcaaggaatccagtcaaaagaaggacagtgacacaggagttaataatggagaaccagtggatttccaaatgatgtggaagagaagaagacatagagtacttctccattcttttctcaaaaggagtctcagtttccttccacttcacagtgtacctcggccgcgacc

SEQ ID NO: 591 - DNA, 357 bp, Arabidopsis thaliana
acagatgtctggcattctactcacaagacttgatacgggtgaagaaactgagctggaggcaaaaggattgttttatggaatagggcattcgccaaacagtcagttattggaaggccaagtcgaactcgacagctccgggtacgtcttggttcgggaaggaacatcaaatacatcagttgaagggtatttgctgcaggagatgtgcaggaccacgaatggagacaagctgtaactgctgctggatcaggatgcatagctgctttgtcagccgagagatacctcacaagtaacaatcttcttgttgaatttcaccagcctcaaactgaagaggccaagaaagaattcacacaacgggat

SEQ ID NO: 592 - DNA, 357 bp, Arabidopsis thaliana
ccaatactaaaactattcggaaacaaattcgagaaagaagttaaagctataggcaaatcaatggatgatattttgcagcgtttgttagatgaatgtagaagagataaagaaggtaacacaatggtcaatcatttgatctctctacaacaacaacaacctgagtattacactgacgttatcatcaaaggccttatgatggtaaaattctataaacttctgtgagatttcaatgaagtgaattgtgagattcgattttaacctgattgtttttgaaattgtgaagtcgatgatgctcgccggaactgagacctccgctgtgacattagagtgggcgatggcgaatctactgagaaatcc

SEQ ID NO: 593 - DNA, 357 bp, Arabidopsis thaliana
attttgccacgacaagggtggagagttgtctttgcaagtaagcctgtcttcaaggcttccacccggaagatactcatagacaagactccacccctctggacatgctccaattagcgtaatgatatttggatgcctcattttacttaggacatcaacctcctgttgatattctacagggccttgcgaactgttaggattcaacatttttatagccacctgagtatgacgcagtaaaccaacgtagatgcttccatatccaccttccccaatcttcagggtcgaatcaaagtgattagttgcttcctcaatctcggagaatgagaaatccgtgaagtacctgcccgggcggccgctcga

SEQ ID NO: 594 - DNA, 357 bp, Arabidopsis thaliana
tcgagcggccgcccgggcaggttggacgtggaccaaccactgggtttactgggctggtcctcttattggtggtggactcgccggaattatctacgactttgtcttcatcgatgaaaatgcccacgagcaattgcctaccaccgattactgaagacgtcaaattcaactttgttaatctgatgaatttttcgtgatttgcttttttaatttgcatcgtaatgggtttctggccgttggatcatttttagatgaatctttgtctattgattgatcatttatgtgtctttgggtttgttgttggagttgtaatatctctggaaggcttttgtgcaattgtattgtacctcggccgcgacc

SEQ ID NO: 595 - DNA, 357 bp, Arabidopsis thaliana
  misc_feature (1)...(357): n = A,T,C or G
acgagcagctgcaagctgtaataactcatctgcttcagagaaactcatgaaccattgtcccaaactatgatctttcgtatcacctctcttctttttcccggtatcttcgacttgcataggagcaggcaagttgtaaccagagggtaatcttggaaaggtcaaagccggatgattctgaaccctagctaaaaaactttctgaaggatcaggaaagacaatctcgtcataagattccacaaccacaggcttcntcattgtcaaaggacctgattcatcttcagggtatagctttaaatgatgatataaactcaatggcttatcacagacatcactgtggaaatgcaatgtcattgcaat

SEQ ID NO: 596 - DNA, 357 bp, Arabidopsis thaliana
acagagtgccaccatagtaattcaacacaatattcatcgtatttgggtcccaacatctgggtagtaatcatgtgctgatggtttaccacaagattcagttcttatgatgtgaattaaacaaagacattttccattttcatttgtcgaagtagtgctctcttttctcatctgattaccttcttccatcagactcagatgctgaatctctgccatgtttatgatgcctagtccttctcattgccccatcttcctcacttgaagactcagccaaacgatgccttttatgttgccttctcttcatacttttcccactatcttcttccgagccactcgaggaggctgaacctctgttgtgcc

SEQ ID NO: 597 - DNA, 357 bp, Arabidopsis thaliana
gcggccgcaaaaaatggagagcaaagggagttggacagtggctgatgccgtagactacaaaggacgacctgccgacaaatccaaaaccggtggttggatcactgccgctctcattcttgggatagaagttgtggagaggctatcaacaatgggaatagcagtgaatttggtaacatatttgatggagacaatgcatctcccaagttcaacctctgccaacattgtcactgatttcatgggcacttccttcctcctatgcttgctcggtggttttctcgctgactccttcctcggccgtttcaaaaccatcggcattttctcaaccattcaagctctgggaactggtgctctagcggt

SEQ ID NO: 598 - DNA, 357 bp, Arabidopsis thaliana
  misc_feature (1)...(357): n = A,T,C or G
tttttttatacgaacttacgacccaataaataagattaagttagagaaagagaaagagaaagaagttgaagatgtgcaaaaacgtaaaccgtagtagttaacaaaagaaaaaacgtggaacacaaaccacaaacccacagctacatgataacattataacaagaacataagttagaagaaaagaaaaagatacaataaagacgttacataacaaaaaagaagaaaagaaagnnntcttcgctcaagtaacggctccgaggaagatcttactggtagtacatgagctgctgcgcgttctggtaaccaccgtcatatattgcctggtttgaaccagtggctcccattgcagcttgttta

SEQ ID NO: 599 - DNA, 357 bp, Arabidopsis thaliana
  misc_feature (1)...(357): n = A,T,C or G
caattgagacagcctccttctgttcctttcatttgggaagagcggcctggcttccccaagaagaattggcaaccttcactagccacttttgtgccttctcctcctccgcttccgccacctatcccagtcccggttaagctggtaacatcagttcctttccgttgggaagaaacgcctggaaaaccactccctgcttcctcaaatgacccacctcagcttccacatccaccattggaaaccgctacgccgactccattaccgcctccagttcctgttccggttaagcaggttacttcnnnncctttcgattgggaataaactccaggacaaccatacccatgctttgttgataccagt

SEQ ID NO: 600 - DNA, 356 bp, Arabidopsis thaliana
  misc_feature (1)...(356): n = A,T,C or G
tttttttttaatctaagcaaaatctcttagaaactggaaatatgtctgaagctcacaaaagattgtcgtctctacttaaaacactcaaaacaccaactatttcgcgtttcgttgaagacagatacataaccagcaaaagtgataaatgatcttcagacaatggcgttagcagcactagcaatccttggccagagatccgcacactctttcccaataggtccagtaattgcagaacctttcatttctcccttagggttcacaatcactccagcattatcttcaaagtacatgaaancannntcctttcggcgccatggcttacgttgcctaacaatcacagcaggaagaaccttttt

SEQ ID NO: 601 - DNA, 356 bp, Arabidopsis thaliana
ttttttttttttgcgcaatccaaattttataaggttttcgacaatgcattgtttttcaataagtacaatggaaaacaaagagattagagagagtaacacaaaagcagaaaacaagttccctttttaaacatccttagcaatgagatcaccattgagaaactctctgtaggcagcaacgggccaaatgaaaccacggaagatgatccgactagccaaaggaacatcgatgatgatctctttcatcgcgggtttcttctcaccactaatagctattaagtagcttcttccaacccacccaatccatccagcaatgtagaggaaaagaatccctggagtaatgaactctccccaatgcc

SEQ ID NO: 602 - DNA, 356 bp, Arabidopsis thaliana
  misc_feature (1)...(356): n = A,T,C or G
ttttgagccactaaaacaattgatatagagagaaaacacaagtgtgtccatcaaatgaggatcagtagtaacaacgcaatcatacaaagtaagaagaaaanaaaaacaagacgaagaaaagggatgagccggggcatcaggccacagcaaaactcacccgaatcaaagctttttattgagcacacaaaaatccccacacctaaccttacaacactaaatgtcacactcaaagagggagaggcccacacaataaacccccttcactctggccatctcattacgggttaagaggcattgccataggaaacagatcctcctcttcgtaacatgattcttcagcaccagcgttctcactt

SEQ ID NO: 603 - DNA, 356 bp, Arabidopsis thaliana
tttttttattttatcgaaatttattggtacaccgtacacgaaacatgcaaacaaacatacaggatcatatagttttacgattcacgaccctcccttattgcatcacacacacatatttacaaacactcatcatcaccgtcaccgaacagcgtttatgcagagtcaactccataaaagaagagatcaccaaaccgatcattggtttgagctttcccaccaaacatcaccagtcctttcttaccatcaatggtacctgtcgtggacgcagaccaacctctgatactcggagtctcttcctcttcacctaacttatccagcttctcccacttcaacgtctctgtatccaacgcaaaagt

SEQ ID NO: 604 - DNA, 356 bp, Arabidopsis thaliana
ggtacatcatcaaaatctattcttcatctatttggtcgcataacaagcaatctcttaacctgtctattacttaaatatgtgtaaaaatatacatcgaaaatatcacccaatctagttgaagatttttggatcgtctttcaccacactttatggcctaaccgtactgataactttacgataatcttgttgatcgtgtttgcaaagtattacctgtatattgaaagaatcctgtgagccgaaatcttaattattgtgtattagtggttagagaaattttcgtattgctttatgagggtttgcatttttttttgtctttcatacttctgcaaagcatataacttgctttttgcagcttt

SEQ ID NO: 605 - DNA, 356 bp, Arabidopsis thaliana
gcggccgctcagttttcacgatggtaacatcttcaatctcctccacacaaggtcccaggacccaagtcatgaggttgatcaaagaatgcagtttcactcttccttggttcggagactttctcaggagcaagaattggagggacatcaaggctgtgttaatgctttagcgtggaactctaatggttcacttttgatatctggatcagatgatttaaggatcaatatttggaattactccagtcggaagcttttgcattctatagatacagggcatactgccaacatcttctgtacgaagtttgtccctgaaacctctgacgagcttgtggtatctggtgctggagatgctgaggtta

SEQ ID NO: 606 - DNA, 356 bp, Arabidopsis thaliana
atgtgccttccatggtctgagtccttctccttgatcttcctcagcttcctctgtattatcgttgataccaagtcgatacaagcgtatactgtctcagcatcttcctcagcacgcacaacaccatgcttctttgtaaacaatgtcacctcacatcttcgaatcctagggcctttaccaaactctccaccacgaacagagagtcttacatcaacttctctcacaagatgactgtgtttctgaacagatttgcctactttctcttcaacatgctgcttaattggctctgataactcgaggttttttccttggatgatcaacttgacggaagcaagagacctgcccgggcggccgctcga

SEQ ID NO: 607 - DNA, 356 bp, Arabidopsis thaliana
ttcgaagagtttttggaaaggttcaagtcggctgcagcttcgaattttggttcgggttggacatggcttgcatataaggcgaatagacttgacgttgcaaatgccgttaatcctctcccaaaggaggaagacaagaaacttgttatagtgaagacgcccaatgcagtaaatccgctcgtatgggattattctccacttctcaccattgatacctgggagcacgcttactatctggattttgagaaccgaagagctgaatacataaatacattcatggaaaagcttgtgtcatgggaaactgtaagcacaaggttggaatccgcaattgctcgagcagtgcaaagagaacaagaagg

SEQ ID NO: 608 - DNA, 356 bp, Arabidopsis thaliana
tttttttttttttttttttttttttttttttaaacaatttaaaccggtcttagagccattgttatagagattacaaataaaatgagtaacgagttttatttctcccttccttaggaaacacagtaagtgatgaaaattttagagatgcttttataaaattgacatttttgtatgaaagataaataaaaccacttattagctcaagggctttacacgcctctccacatcgaattgaacttcagatagaccggtgattccggccgttatcttctgacctatctttacaggtccaacaccttctggtgtgcctgtcaagatgacatctccttcgtaaagggtcattatagaacttatgt

SEQ ID NO: 609 - DNA, 356 bp, Arabidopsis thaliana
ctttttttttttttttgaaaggaaaagtacacagcaatgttgttattgatacagagacagttacagttgaaagaaacaaacttttgtatgtaatgaaagtagatagataacagcattactacgacgaagctttcttttgcttatacctagcagcagagaagaagtaaaccgccatgttcacaaggctaagaccagccaagagccagaagaagtaatcgagatgacctgaattgagattatccgaaatccaaccttcttgcccatttcttgttgtaaaataagtcacgagcgtgaggatcaacgagctcaagtagttaccaagtgcattggtcaaaagagctaaggcactgcacaag

SEQ ID NO: 610 - DNA, 356 bp, Arabidopsis thaliana
ttttttttgttctactaagcggcgcaaagctgacgccataatactgcatcaatgtcatacatgcacgcaacaagcatccataactcgatccaaattcttataagaatgtaactacatatataaggatacaacattagtcaaacatgtaatctgaaatggtatgattataccaccaccatcttgttcctctataaccgaaatcgccacggacacataccggtttagagtttctattttgttattccctttctgttttaagatatcatccaaaacgctccgacaatctctgatatgtacacaattaaaccagagaacatcagcttccgatgttttacgggagaagaaggcgggagcgg

SEQ ID NO: 611 - DNA, 356 bp, Arabidopsis thaliana
  misc_feature (1)...(356): n = A,T,C or G
ttttttttttttttttttagttaacggatttttggccaaaaagtctaccaaaaatatatatgtagatttttcttcttctcttcccctactttttttagtctctcccaaccaacaaagagttatttttttcaaaagcatgaaactaaaattacaaacaacctaatagcagccgatactgctctgcttttgtttcctccacttgcgtttatgtgcacttgcttcttctgctccttttcacttgcctctactgctactttttgctttgacttaggtgacttttgctgtgtgataccgaannaatcttcgaggtcatcatcgacgtttgcagaccttcgagtagtctagaagttggctgg

SEQ ID NO: 612 - DNA, 356 bp, Arabidopsis thaliana
ttacaatcacagttcctaagaacattacaattccaacatcacatacatctcacattgctaaaccggaaccaatcccggtttactactatgtgatttcacaatgtgtaagtcatgcatgactcatgagccatccaagatctttaagattgagatccctgctcgagtaacccttccatgttgttgctatcactgctactgccccagccactgatatttccataagctctttctttccaaatctgttcaacttccgaaaacgttagcccttgagtctcagggacaaacacaatcacaaagattacagcaagaaccgcaattcccgccaaaatcaagaaagtcattcctcttccagcagc

SEQ ID NO: 613 - DNA, 356 bp, Arabidopsis thaliana
caaacttgtcctaacagaaactctggaagccgaagaaggctgtgggtggagagaatctatgaagatatccaaaccagcttaaaggagagaaatatacatcatgattttcagttgaacaagctctcccttgttatcacgagagtgactgcactcttgggaatcctgaaagaaaatgaaacaccggagcatgcaaaaggggctatcaaagcacttcaggatctctacgatgttatgcggcttgacatattgacttttaatatgaggggtcattatgaaacgtggaacctgttaactcaagcctggaatgaaggtcggctttttacaaagttgaaatggcctaaagaccctgagctgaa

SEQ ID NO: 614 - DNA, 356 bp, Arabidopsis thaliana
ttttttttaaatcaactttccattttattcatcgaagtaagagatcagttcgatacatgtggaatataaagcacaactatatcatcatatgtatgtatatttctttcttttagatttgagtaattagaaatggtaactccaaacaaaagaagtaaattcaaagcttattctggtaaccccatggattattgtttgcccatttccactgatctctgcacatctcatccactccatattttgccttccagccaagttctttctcagccttctctgttgaagcataaactgctgttgcatctcctgaccttctcggacagagcttaatcgggattttcttgccggaagctttttcaaaa

SEQ ID NO: 615 - DNA, 356 bp, Arabidopsis thaliana
ttttaaataaaacacctcattgaatactacaattgtttatgaaatagacaactctaaacaaatatatacaacaaaacaaaattgatttttcaacattttacaactaaatttagatctagcgactacgatgcgaagaacttctattagagatagagtcaggaggagaaagtgagattgaagaatcacattcacaatcctcaagatcttcatatccccaaaactcttctttaacttcttcttcctcttccattttccatttctctttctctatatcttctccttgtagtacttctaagacctcgatcatggaaggtcgacatagagaagaagatcggatgcagagagacgcggcgaaa

SEQ ID NO: 616 - DNA, 356 bp, Arabidopsis thaliana
ggaactgggtggacggcagagcattccgttaacgccgctttgggacaattcgaagatttttcgttgaatcgtggctcttctgtgaatacccatctcttctcctgggttgaggatgaggagaggcttatcgagattattaagcaagcggcaaaggaaggggcaatgtgtttctacactttagcaaatccttctatggcaaaatccgcaaagcaagcttgtgatcagttgggtgtgctttcggttgatattctaggaccaatcatcgaagggattgcgtctcacttaggtgtttctccgtcaggtcttacacgtggagcacctggtagggtcaagactctcaatgatgcatatttcaa

SEQ ID NO: 617 - DNA, 355 bp, Arabidopsis thaliana
ctttttttttttttttattctttttttgcaaaaaaggactcagattcgccttttctcagacaaattagaggattaactcttcagccatggctgcttacaaagaaaaaaaggagttctcttttttccttatagccccgccatgaaagaagagtgttaccacaatgtctggtttattgacttcttaagaatcatcattgtctcccaataagaagaagaagaagaagaagaagagagcttaaccgaaaaacaaagaagaagaagaagatagagatccaagtaaagtagaatctttaatcgaggaagctcagtagtagtggcagtggtggtgacggaggagatgattggatgattcatc

SEQ ID NO: 618 - DNA, 355 bp, Arabidopsis thaliana
tatttcattaccgtttaaatatctttttgataatgactcttcaaacaacaaaatgtaaatctcttcaccatacaaaaagacaaaggaattgtaattaacatttgtcatagacaattatcttctctgcagctttacaacactaaaaagagcttgaaactgaagtaatttaagcagaggctgctggctctgaagttgctgcttctgctgctgcagctctcttcttggcaaagtattcatctgctcgtgcttggttctttgcaacagatggcttaacccatttctttcttcccggcaacacagtgagtgtacaacctgaagcttcaagcttctcttttgcttgtgttgagaaggcacg

SEQ ID NO: 619 - DNA, 355 bp, Arabidopsis thaliana
ccacgaccagtaatgcacagccttggccattggcatcacattagcccctgagaagatcaagggaatatgaatctgatgtatcgagcggccgcccgggcaggtacgaggttgctttgaccgagccagggacttacagcttctactgtgcgccacatcagggtgctggtatggtcggtaaagtcaccgttaactaaaatgtgtgtgtgagtaagtgagggagtctcggactcaattagaggctcttctttcacattcttacattattacataaagtgttttgtaattctaaagagtgttgaatcgaatggaccgtgattgttgttgtaataaaaaaaaaaaaaaaaaaaaaaaaaaa

SEQ ID NO: 620 - DNA, 355 bp, Arabidopsis thaliana
tcaagaaccgggttacattcagaatttctcgaccacaattcgtttacggtttagagaacatacagtacaatgccattacagattctccattttgttctacattaaagagggatcaggtaaactcaaaaaaaccaaaactatagtgagtaggatcacagtgtagtaaccggtttaactgggcaaatgaaccaagtttcggtttgataaagatgtcctcatttcacagttcagtccctgaggggtttcattcccagtgatgctctcagtctattcatctctgcaatttcaggatttggatgatcggttccatcttccttcatcttctccttcttttctttctttttcttaggttctt

SEQ ID NO: 621 - DNA, 355 bp, Arabidopsis thaliana
agatggtttatttttctcctttctgtgatttcaattatacggaatggtttaattccaagttcaaggattacacaaaaaaaccaactcaaatgcaaggcgatatgacaccacggagttacaaagtagtagaatgacaggaaatgtcaaatgattgttttgcggtttaatcttattcgggatcatatagagaaaaacaaacaaacaaacaaacttaggcctttgtagctccggatttcacaaggttttcaagggcctttagaatctgtggctctgtcagaccatccaagtttacacacctctccacacccatatcatatcttgcccacatctgaggctggactccactacattcacg

SEQ ID NO: 622 - DNA, 355 bp, Arabidopsis thaliana
tcgagcggccgcccgggcaggtacgcaaaaaagtgtgaactttatacattatttgcatcatacaatagtttggaaacaataaactgtatcaacctcgatgatatagtcaagtgttgcagatggaggaatctccaaaccctgtccaaattcgacatttctgtctccaaatcctaaggacggtggaattatcactctacgtttacctccagccttcattgacctgagaacatgctctataccttggcatagtcccttgctatacggtcttgagtccattaccatcgctagtgacttgcctttgcctccaaatgtgtccacgaacacttgttcagtgccatgtacctcggccgcgacc

SEQ ID NO: 623 - DNA, 355 bp, Arabidopsis thaliana
  misc_feature (1)...(355): n = A,T,C or G
agaagaaacacactatctctctctctctctcaatacatctttcctcacttctgatcagtgtgatcacgtnnagtgccttgaaggagaagaaagaaacaaaaagaaataaaaatgggataccttctagaagaaaccttaagctctaactctaaaaccccaattgttatcgatgatgataacgagttgggtttgatggccgtgagactagccaatgctgctgcctttccgatggttctcaaagccgccctcgagctcggtgtctttgacactctctatgctgaagcctctcgcagcgactcgttcctttcaccatctgaaatagcgagtaagctaccaactacacctcgtaaccctg

SEQ ID NO: 624 - DNA, 355 bp, Arabidopsis thaliana
ctctaacgtcgtccgtactgttccgaggaagcaaatcgatcggtactattactaagatagcatcaacaatcaggacggtaaaaatggcggcttttgctgggtctgactcagaaacaacgtcgtctacctcgagagttatcgattctcatctccacatttgggcttctcctcaagaggccgagacatatccttattttcctggccaagaacctactttgactggtgatgtcaatttcttgcttaagaacatggaagaggcaagagtagatggagctctcattgtgcaacccataaatcacaagtttgaccattctttagtaacaagtgttctgaagagatacccgtcaaagtttgt

SEQ ID NO: 625 - DNA, 355 bp, Arabidopsis thaliana
tttttttttttttacaagaagaattatataaaaaaaaaaagtgaaagcaaacgcatacatagaaatatgagatttggtaagtaagagataaaaatattcaccaatttcaaccgaaattaaggaaaaaaacatactctataaaaatgaaatcctagtagtattttacagatctttactgggccaaaattataatcattcatggcccaaggcttaaatggaggtccagcccaataccattctctaacttaattccgctactccgatcactatctccggcgaacctcctcatctccggcaaagaaccaccatgagtctttacttctccggccatagactccatgccacctccgtaaag

SEQ ID NO: 626 - DNA, 355 bp, Arabidopsis thaliana
tgcagcttcaggggcagcgtcatcttcttttgcttcgggaattgaggcggtgtcgtcaggtttgtgatcatcagaaggaggagaagcgccaccagaagaggcggatcgacggtggttagcagcggcttgatggacgtgattgtaactgcctttctcgagaaagagctgattgaagtggactttacagtagaggacgccattaagagaagcgtaagaagagtgagtcaaaggacaaccactgtgtgtgcacctgaagcaagtcttgtgtatccatcaattgagacaaatcagatgaaaaaaaagaggaaataaaaacaagatgatgaatctttgaagacattaccagatgatcatt

SEQ ID NO: 627 - DNA, 355 bp, Arabidopsis thaliana
tttttttgaggatcaagtataacattaagaaaacataacatgatgcaatgtatggaacttacaatagatcaaagaaataatctaaaccttgtccgatttcccagattgaaatgccgattccccagagacgagcattctcaagccgtagaaggattgacatcaatgtaggatagaaaacagcatgcttgatgttcttatcatctctatacatgaaaagatgttcgccgctctctttatcccaacggaaagttggcttgtgtttctggagtaatgcgaggtaatcccttccggtgattgctcctccacctcctgaatctccagagattacaaaatcgttgccgtaaaagttgatacc

SEQ ID NO: 628 - DNA, 355 bp, Arabidopsis thaliana
gcggccgcgggaacgccgactgcgatgaggaatgctttcggcaacgttttatcagtcctgatcctcgtcctcattggtgtcctcgctttctcgatccgactcttctctgttataaagtatgaaagtgtgattcatgagtttgatccttacttcaattatagagtcactcagttcttatcgaagaatggaatatacgagttctggaattggtttgatgataggacctggtatcctcttggccgtgtgattggaggaactgtttaccctgggttaactttgactgctggaaccatctggtggggattaaattcattaaacattcctctgtcagtagagactgtctgtgtcttcactg

SEQ ID NO: 629 - DNA, 355 bp, Arabidopsis thaliana
  misc_feature (1)...(355): n = A,T,C or G
ttttttttagtagtaactgttttcttgaagaacacaaggagtttgatagaagaacttaacaaccccaacaatagttgcacacatccataatcatttacgatttnnngcatctatacattgcatccagatacttataaaaatttccagaaagagaagttggattcataacagtatgtgtaagagtacttactgggtgttgtgttgttgaggttttttcattgctctctctaantccatcttgcaatcgtctcgcaattttttcattctcacaaagctgttttgaaggtggctactctcttcactgaggatatcgcccatgctaagaaagagcgacctccactgggccatgagcttg

SEQ ID NO: 630 - DNA, 355 bp, Arabidopsis thaliana
  misc_feature (1)...(355): n = A,T,C or G
ttttttttttttttgaagagaataaaattcaacattgaacccaaatatggaccaaatcatgtatanaatcatattgaggagtacaagttgtaatatgagaattgtataatcattaactgattatacaacgaacaaacagattttgttgcgacaagtgagacagatgaaaacaatattgagagctaataatgatatcttcttgctgatatgtacatcactaatttacctctgactgctgatgctggaatgattggactgaggatcttctgcaggcaatgtgaccattttgacagcgggtgagggcttctctggttctgcaactatgtgaagagagttcttagtgtctattgtctgt

SEQ ID NO: 631 - DNA, 355 bp, Arabidopsis thaliana
cctctagagcggccgcccttttttttttttttttttttattatattttacattaacattactagtattctcacgttgctactgcaagttgcacaaaagagaggcaataccaaagccaacattaaggctgtctttttcttttcttttctttttcctttcaaaccatagttattacaaacacatactcacattatatagagctacgtctattttcttactttgttacccacacaatgttatcaagagggaagaaatggcaaaccggtgctgacctcggctccatcttcaacaccttaaaagctacatgatccgcgtcccacgtggatgtgtccatgtggcagacagcgggtcctact

SEQ ID NO: 632 - DNA, 355 bp, Arabidopsis thaliana
cctctagagcggccgcccttttttttttttttttttctgctgagattagattcattcacggaaatgagtattacattcaaagcttggatcttggaaaatagtaaaagaaaaaaattacactctgagttacagaaaatctgttgcaaatttcacaaattgagaaaaacaatagcggcaaatcaccatccgtatttagcttgtgtctcggctttcgtgagcaatcctctagaacgtctctctgtcaactccgactccttgtgcttcatgtccatgaacaacgcagtgatttgatgcttcctcttgtgaagctttgacactttccctttagatgaagatgttaccggctgatacgcag

SEQ ID NO: 633 - DNA, 355 bp, Arabidopsis thaliana
gacaagtatgatgcagcagttggtgatatcaccatcacttccaacagatctttgtatgttgattttactttgccgtacactgacattggtattggaatcctgacagtaaaaaagaaaagccaagggatgtggactttctttgatccttttgaaaaatccttgtggctagcgagtggagctttcttcgtcttgaccgggattgttgtttggttggttgaacggtccgttaatccggagtttcaaggctcttggggacaacaacttagtatgatgctctggtttggattctctaccattgtgtttgctcacagggagaagctacagaaaatgtcatcaagattcttagtcatagttt

SEQ ID NO: 634 - DNA, 355 bp, Arabidopsis thaliana
cagggatgctgagaaagctaggaggattattgtcgaagcacttgaccatgtacaaccgtcaaaacctctcatggaagcactgattcattttgaggcgattcagccaccaccaagagagattgattaccttgagccacttgtagagaaagttataaagccagatgcagatgcccaaaacattgcaagttccactgagagggaagagctatccttaatatatatagagttcctgggtatttttggagatgtgaagtccattaaaaaagcggaagatcaacatgttaaactgttttatcctcatcggagcacgtcggagctgaaaaagcgtagcgcagatgattttctcgcatcagat

SEQ ID NO: 635 - DNA, 355 bp, Arabidopsis thaliana
  misc_feature (1)...(355): n = A,T,C or G
caaaatcccaacttggcctctgtttttgctttcttttatgttctcttcttctctaaaaaccatctcatacttccaagaatttctctcacaaagaccaagaactcaaaatgtatcaagattctggattaatgctccgttacatgcaaaactgtcccccagatattcaacaattcnaagacctcttcaaatcatacaaactctccgatgaaatgaacaacacttttgttgagtcatcaaacatatctgagtatgatattggagaagaaagtgatctttttagagctcctgatccaattcttgaagaaccaatcttaaccgttgatccactctctgctgctttgactatgatctcttg

SEQ ID NO: 636 - DNA, 355 bp, Arabidopsis thaliana
acagaaactttctgaaatgactttctccttaacaccagcttcctcgattgacttcagggtgttttgatcttggggcgtgtcggaagcaactggtaacaagaaatgatggaggtgatgaatccaaaagctccggtgacacgaggagtgatcttcgttggagctaactgaagaagaccagctgctacaacaatgtccatagctgatttgatcaaagcaagtgacctctcgtttgatttttttagcttagcacgataatcctcatcctgatacttgtttccattcttgagtcccttttcgatcttcttcattgatgaagaaagccttcccatctcaccaacctcgactaaagttgtgc

SEQ ID NO: 637 - DNA, 354 bp, Arabidopsis thaliana
gtgatatatacaaaagaacagagttaaaaaaaaagaaacaaacagtttctactaattttcccaagtacatatctgatatgctctcataagttccattccaccaaaaaacatgtaaacaaagtatacactatcgtatatataaagctaaggagaaactcagtgtggcgagtgaggaaaaattaactgagacattgaaaagaccgccattgaaatgcaaatatggatgtggagtggtctaaagcaaccttcttactgtagatgaaattaggttgcagagctgagagaagaactaatgcattcagacattgatctgcgacaatctgtcgatgacttcttgtctaagcaatatgggga

SEQ ID NO: 638 - DNA, 354 bp, Arabidopsis thaliana
  misc_feature (1)...(354): n = A,T,C or G
agtcaagcaaaagctttcgacgaggccaaaatcggtgtgaaagggcttgtggattcaggaatcacagagattccggccctgttccgtgcaacgccggctactcttgcaagcctgaagtcgccaccacctccaaagcatctcaccatccctaccgttgatctcaaaggagcaagcgtggtggagaagatcgnnnaagctgctgagaaatggggattattccatttggtgaatcacggcatcccggtggaggttctggagaggatgattcaagggattcgcgggtttcacgagcaagaacctgaagccaagaaacgcttctactctagggatcacactagagacgtgctttacttt

SEQ ID NO: 639 - DNA, 354 bp, Arabidopsis thaliana
gcccgggcaggttgcaaacatacataggaggagtctcgtgcccgtatgtatgttcaaagagccaagaccatggagtgctcttggttgggtttggttcatcgggttatgcaccaatccgtcttaaggagaagccttattggattatcaagaactcgtggggagcgatgtggggagagcatggttactacaaaatctgcagagggcctcataatatgtgtggtatggatacaatggtatctactgttgctgctgttcatacctcacccaagtagaattattaggacactacctgtctatctttgtgtatatgtatgtatggttgcataaagatactacgaacttttatcgttaaaa

SEQ ID NO: 640 - DNA, 354 bp, Arabidopsis thaliana
tttttttagaaaagatgctgaattataaaatcaaagaatggagatggctttgcaatttgcattggccaattcatgagattcaaacaaaaagaacaattcaatgtgatggcgtccctgcagctgaagtttttcttagttgacgttggcttctgtttttggatccacgtccttttgcaatgtggcctcggtggtgaacgctaggggaggctgatccaacaacactcttggtggatgttcttttgcgcctgtggtgcaaagaatctccaccaccaaacgcagctctcgctacactatctttgagaacttccctggctcgttgtggcttaatgagctgcttgttatggtaaactagct

SEQ ID NO: 641 - DNA, 354 bp, Arabidopsis thaliana
ctttttttttttttttttttgctcttagtactcgttcaattcatataataggaaatagtgtgcccacaacaaatcttattacacaaatttttaaatcaaaccgagcaaagaaaacagaagaaaaacacttttgcaattcagtatacaaaacaaaaaaccgccgacgatttaaacctcttctcagttacaatcctataggaggtaaaatgcaatctccaaaattgccattttctcacatgaaatcatcatcgtccatggcatcataaggacccgaaacaagatcatcatcaggcttatcaacatgaagttgtttcttcttacctgacttctttttgccagcagcagcttctttct

SEQ ID NO: 642 - DNA, 354 bp, Arabidopsis thaliana
  misc_feature (1)...(354): n = A,T,C or G
actagggattgtgccgtgggtttaggatcatggcaatggggaagtattctcgtgtagacgggaagaagtcatcgggatatggcttaaccattaccatcgttttaattgtttctctatgtttggttggggcgtggatgttcatgtcttcatggtctgctccaactgagtctattgacttctctgcaaacgagaggacaaaagatgtagatactactaagagtgatttcaaaagtgaagaggttgatcgaggttccaagagttttccggatgnnnagaatgaggagacggaggttgtgacagagaccaacgaagagaagactgatcctgagaaatctggtgaggagaactctggtg

SEQ ID NO: 643 - DNA, 354 bp, Arabidopsis thaliana
cttttttttttttttttttttttttttttttttttttttttttctccaaagcaagagtgtattaaacacactaaatcacattctgttttttgaaccacaccgaatcagttttgatcaaatacccgttttcagagttttgtcacaaattactattcatcagcgtaaactttagataaacgagtgattaaaccacaacaccttaaagtttatcttggagagaaatgaaagtgaggactctgttttatgtacagtgcagagccatccagccatccatgagaccatacttgtttcccggattcacgagcacatacttgtttaaatctgatattaggtgcttgagctaccgagatcaaa

SEQ ID NO: 644 - DNA, 354 bp, Arabidopsis thaliana
  misc_feature (1)...(354): n = A,T,C or G
ttttttttaaatatccacgattatatacaaccgtgcaaagaagattcttttgtttcatcggcaaacttgttttactcgcaatacatattactctttgtcacctctaaagaagcttcgaaactagcacttgttgtttcaattttcgtacatcaattctcatcaaaagccgactcaaacataaaccgagagtttataaannacagatgtcagaaagactagaagatgactttgcaatcgatgaagagagatcctcctactatggcggagctccataccattcatatgggagtcaaggccaggaacacccaaaaaccacctctgctccgattcctctcttcctctgcctctcacacc

SEQ ID NO: 645 - DNA, 354 bp, Arabidopsis thaliana
cggccgcccttttttttttttttttttttgggaaaatagcttgaatatacagaaatttataacaccatgattttatagtgttaaagagtgtcacacaaactttggactagagtcactcagacactagactaagaatatttctgagctattcaattactttaaaatcacctgttaagttgagtatgacagtgttttgaatggttgtcctcactagaagttgaaaaatcagcaagcaattcaattaccagtgcaccaaacccagagcctcagctgcgcttctttgactatcttcactgcaacacattccaacaaacgttttcagtagagactgtcgctcttcaagcttcatgagtt

SEQ ID NO: 646 - DNA, 354 bp, Arabidopsis thaliana
  misc_feature (1)...(354): n = A,T,C or G
tttaacgtaattctattgagacaaaggatgtgaagtgtcatacatcttaacaacaaaggaggcggcataacgagagtaacattggctgcgtcacgggcgagaagaacgattattggaaacaacaatgaatgtacatagaatcttgggagctgatttcgaatagatcaacctcaacactgttgcatggaacagattcatccggattgtttactcgagaaagcacaagaagaattatatgacattattcaaccaggaaatggcttnnagattcctcgttctctcatccgattcatgactcttgaagcatcgtttagtttatctgctctctcatacaaagccgccacaaccaaatgc

SEQ ID NO: 647 - DNA, 354 bp, Arabidopsis thaliana
ggatcctctagagcggccgccctttttttttttttttataaaatcttatctattctcaacaaataatatcgtataacataactcttacaaaaaaatatcaaaataacaattaaatagaaataacaacatcaaagaataaatatcatatatatcgtactaaatacataacatttagctaactcgccgtatgtaccatcgtagataccaaacattataaagattcgtaatagaaccataattctcttcaacataatcacatataattttattgtaacatactaaatatttgatcctcttgtgttgataggttctcatctaaacaacactaatgcgaacagtttttttaacatagta

SEQ ID NO: 648 - DNA, 354 bp, Arabidopsis thaliana
tttttttttttttaacatcataattattggaattctttcaaggcctttcttgggccctttgaagggccttccatcgctattcatcatcaattttcttgcagttccaagatccccaaatcaaacattcaaaagttgaaaacaaatcttggtaatgaataaaagattctttcaaggtagcgtgaaaagactagtgatgtataggaatgatgaatcaggcttcggtgatctctttctctttggacttgcacatgtcctctgctgacttcacaaatttcttcgtcaactcatctacttccttctccagtctttttacttcatcctttggtagactcgagcctgctttctttatcgtgt

SEQ ID NO: 649 - DNA, 354 bp, Arabidopsis thaliana
ggaaagtctgagttccttgttgctgcatcccatattccaagacctgaactatctgtttggaatacatcaaagttatctttatcatggtcatatgggttacgcatagaagctgtcacctctgcagtggattcgtcagcatttgcagtcttggctgtgatcccaaaaacttttaaaacagatgaatctaaggagaacatcttccgtggtagagatggtgccattcttttgtttaacggatcagatcccaagccggtatctatatggactgtgatgaaggctaggggaggatcaatctcatttttagaaggagataagtctcagcttcgccttgcatatgtaaatggaagccatgaa

SEQ ID NO: 650 - DNA, 354 bp, Arabidopsis thaliana
  misc_feature (1)...(354): n = A,T,C or G
ggaaaacaaaattggaacttgctgcataaagtttagtttttttattgaatttggaaggatgattgggaatccagtaattcaagttccatcatcactaatgccatcatcctccatgattgcttgtcctcgagtttcacccaatggggttccttatcttccaccaaaacctagaactaggcatttagtggtcagagctgcatccaattccgatgctgctcatggtcaaccatcgtctgatggggggaagaannntctcaccgttgttttggatgtgcccaggaatatatggagacagactttaaaacctttgagtgattttgggtttggtaagagaagtatttgggaaggtggtgt

SEQ ID NO: 651 - DNA, 354 bp, Arabidopsis thaliana
  misc_feature (1)...(354): n = A,T,C or G
cggctacttcatccatcgctccttctctttcatgcccatctccttcttcttcatccaaaaccctttggtcttccaaagccagaaccttggctctacccaatatcggtttcctctcgtcttcttccaagtctctgaggtcgcttactgccaccgtcgctggaaatggcgccactggatcctcccttgccgctcgcatggtttcttcgtctgcggtcaaagcccctgtttctctcgattttgagacatctgtcttcaaaaaggagaaagtttctcttgctggttannnagagtacattgtgagaggaggaagagacttgttcaagcatctcccagatgctttcaaggggattaagc

SEQ ID NO: 652 - DNA, 353 bp, Arabidopsis thaliana
tcgagcgccgcccgggcaggtactcactacgcatcatcactgggatcatgccggtggaaacgagaagattaagcagttggttcctgatatcaaagtatatggaggttctctggataaggtgaagggttgcactgatgcggttgataatggtgacaagctgactttgggtcaggatattaacatattggctctccacactccttgtcacaccaagggtcacattagttattatgtgaccggaaaagaaggagaaaacccagccgtgttcaccggagatacactttttgttgctggatgtgggaagttttttgaagggacagctgagcagatgtatcagtcgttgtgtgtgactc

SEQ ID NO: 653 - DNA, 353 bp, Arabidopsis thaliana
atactaaagatggaatctttgaactaaattcgaaaccttttaatgggtaccgagtcgggttcggatccagaatcgagctcaaacgggtggagccgtgctcgtggtctagttgtcaagactctggttttaattggcggtgctcttctcatcaagcgtctcactaaatccaccactcgtagagatcacgcccgtgtcgtctctcgttctctcaccggagagaagtttacgagggagcaagcgtcaagagatcctgataattacttcaacataagaatgctgagttgtccagctgctgaaatggtggatggttcagaggttttgtatctcgaacaggcattttggaggactcctca

SEQ ID NO: 654 - DNA, 353 bp, Arabidopsis thaliana
  misc_feature (1)...(353): n = A,T,C or G
tcgagcggccgcccgggcaggtgcttaaacacagaaatggcttctttaccgttcggagtttcgaatctatgcagaaatcaggaggttctgtctgcgtctgtaaggcttcttccggttgggcgacaaaccacaggattcggagctgcgaagaaagtcttatatagattcgagggacatagattgtcatcatcagtagaaaagggagagannnagagaatgagatgtagagttagctcaaactctactgaaactgaagacgattctgccacaaaaaccaagacgacgccgtttggttacacgaggaaggatgttatattgataggagtgggagtgactgcacttggtatcgggct

SEQ ID NO: 655 - DNA, 353 bp, Arabidopsis thaliana
tggaagcactatacgattcgggcaaggcacgagccataggtgtaagcaatttctctaccaagaaactagctgatctcttggagttagctcgtgttcctcctgctgttaatcaggtcgaatgtcatccttcttggcgacaaactaagctacaagaattctgcaaatccaaaggggttcacctaagtgcgtactcgccattaggttctccagggacaacatggctgaagagcgatgttttgaagaacccgatactgaatatggttgcggaaaaactcggaaagagtcctgcgcaagtcgcccttcgttggggactccaaatgggtcacagtgtgcttcccaagagtacctcggcc

SEQ ID NO: 656 - DNA, 353 bp, Arabidopsis thaliana
  misc_feature (1)...(353): n = A,T,C or G
ggaaatactcttatcttggtcaaggagaaagcacctcctacagctatataatgtatagatcagggaagatacatcataccgtcattgggccattggaagcggatactgtttattattaccgttgtggtggagaaggacctgagttccatttgaaaacaccaccagctcagttcccgattacttttgcagtggnnnnngatcttggacaaaccggttggactaagtcgactctagatcatattgatcaatgcaaatatgctgtgcatctacttccaggggatctatcgtatgcggactatatgcagcataagtgggacacgtttggggaactagttcagcctctggcaagtgta

SEQ ID NO: 657 - DNA, 353 bp, Arabidopsis thaliana
ccacgcgtccgaaacattttgagaaaccaaagaagaagaagaagaagaagaacaagcagaagctaaagaagaagacttgaacttgagagatggagcgcagacagtcatatgtgcttgtcgcgctcattggattgcttctcttgacagatattgtcattgcacagagcgatggcggcaaaggcaacggtaacaatggcaaggggaacgaggtacaagtagacaagggtaaaggagataatggcaaaagtaacggtaacggtccaaaggataaagaacaggagaagaaggacaaggagaaggcagccaaggacaagaaggagaaggagaaaaaggataaggaggaaaaggagaag

SEQ ID NO: 658 - DNA, 353 bp, Arabidopsis thaliana
gagaaatataatgggagttgagagcaacgtccaacctcttacttctccactgagcaaaatggtgttgccaccaactgcaaagggtaatgatggaactgcctctgatagcaaccctggtgatgttgcggctagtattggtagagctttttcaccatctattgtatctggttcgcagtggaggcctggtagtccctttcagagtcagaatgaaacggttcgtgggagaactgaaatagcaccagaccaaagagagaaattcttacagagattacagcaagtacagcaaggccatggtaacctcttaggcataccttctttatctggaggaaacgagaagcagttttcttcacaac

SEQ ID NO: 659 - DNA, 353 bp, Arabidopsis thaliana
  misc_feature (1)...(353): n = A,T,C or G
cgagagagagccttaaggaaattaaaaaaggttggattttgatcgatgggttcttcgtcaggacaacccgaatttgattacttgtttaaggttttattgatcggagattctggtgttggaaagagctctcttttgttgagtttcacatctaatacctttgatgatctttctccaacgattggtgtggattttaaggttaagtatctgacaattggagaaaagaaactcaagcttgcgatttgggatacagctgggcaagagagatttaggacgcnnncaagttcgtattacagaggagctcagggtataattatggtatatgatgtgacacgaagagacacgttcacaaacct

SEQ ID NO: 660 - DNA, 353 bp, Arabidopsis thaliana
aggatgctgagtctgtgcttgtccttcattgtcctgatggaaagaagaggatcaatagagctgtttggggtcccctgaaccaaactattgttagtggtggtgaagataaagttatcagaatctgggatgccgagacgggaaaattgctcaagcaatcagatgaggaagtgggtcacaagaaggacattacatcgctctgcaaagcagctgatgactctcacttccttacaggttcacttgacaaaactgcaaagctttgggacatgagaacgctgactcttcttaagacttacaccactgtggtgcccgtaaatgctgtctccctgtctccacttctcaaccatgttgtacct

SEQ ID NO: 661 - DNA, 353 bp, Arabidopsis thaliana
tcgagcggccgcccgggcaggtcagcgaaagagacatttccaaatctaatctcaatccaatccaattcagggttgttgctaccttcacgaatgacgacgacttctgtttgcccgttctcgaaagctgctcgtcctgacgatgggtcgactcgaaaacaaggcgaaattaccgcttctggttgtcctttttctaaagctgctcgtcccgacgatgcctctgctcgaaagcaaggggaaacgacggcttctggttgccctttttctaaatctgctcgtcctgacgaaaatgggagtaaaggatgtcctgaacaagaaggaaacttgaataaggactctactgattctgcaacggt

SEQ ID NO: 662 - DNA, 353 bp, Arabidopsis thaliana
gcacatactcaaatatggaattcacggaggcttacaagcaaacaggtccttgttgtttctccccaaactctcgttacgtcgccgtcgccaatgattatcgtctcgtgatccgtgatacgttttcgtttcaggttgtgcaattgttttcttgcttagataaaataagctacatagaatgggctcttgattcagagtacattctttgtggtctttataaaaaaccgatgattcaagcttggtctttgactcaaccagaatggacttgcaagattgatgaaggtcctgctggtatttcatacgctaggtggagtccagatagccgtcatatactcactacgtcagagtttcagctg

SEQ ID NO: 663 - DNA, 353 bp, Arabidopsis thaliana
ccgtgtaaaaccaacctaaaaatccaaggtgttttgttttttacattcaagaaaagcaaacttacacagacaaagttgttttttaacagtcatataaatctctaccagaagatcaaattggacagtttttaaaactccaaaccaacattccatcacacgagttcttgataacttgaaagacaaatcgaatcctcatgtcacctattcctcttctctttccggaggaaggccgcagggtaatagcattttctgcatgaaattgtagcgttctcgtccaatagactcgttctcagcaatagcaaagtatgaaagcatagggtagtgaccaatgtatgaagcataactatcacgct

SEQ ID NO: 664 - DNA, 353 bp, Arabidopsis thaliana
ggatcctctagagcggccgccctttttttttttttttgtttaataataaaaggaaaatgtctaatatcaatcccaaattccaatctaaaaatagaaagttatacaaggcctatgcacttgagaaaaaaaatcccaagggactatagggattaaatcgttgatttgatcatgaccctatacatcaatcgactaagagacataggctgcgtagtagtagtagtagtaatatagtagctgaacaaaacggagttgataatattaagggatttttcatttggatgtcttttttttttggttttctgtttcttataacaaaactgacacgcgcttcttcttgttgtgtttgatgtttg

SEQ ID NO: 665 - DNA, 353 bp, Arabidopsis thaliana
gcggccgcggaggagtttcgtcttcgagtcgtcgttgttcttccggtactgctggtgctgcaaatgcagaagcaagaatgaagtttgctgctgttgatgctataacagaattagtgtggtctcctagcaacggtctaagcttaagatgtgcagatatcagtttcacgggaaaggcaaaattactctctcctaacttctttgatataggactaactaacatggcgattcactcaaatagcacaagtattgaagaccaagaagatcacgtagatgtcgaattgagaaaccgagatcaagtgaaccaagcaatgattggtggttctgttgaggatatgaaacctgaaatggttgag

SEQ ID NO: 666 - DNA, 353 bp, Arabidopsis thaliana
cctctagagcggccgccctttttttttttttttgacccaaaaactgtgaatacgttcacactcagtttgttttgatattaccgtatacatatgtgtgaatccgatcataaaagtactacgtataacagttgaaacaaaagaaatcaaaattttcgagggaggcaaggcaagctcgcactctctcactcatcatcggttccaaaatagcggtctccaaactcgcccataccaggaacaactcggaactcgtcgtttaaaccgagttctatctctgaagtcacaatctttatccttgggaactttttgcacaccacatttactccttcaggtgcagatatcaaattgagaaatat

SEQ ID NO: 667 - DNA, 353 bp, Arabidopsis thaliana
ttttttttttttttttataatcttctctttccattgtttctattgacaaataatctcaatcctgtttactttctcatgtatacagagactcctttttgttcatgtgttctctactacacttttatgttcatcaatgggatctccaagtctcttttgcagataaactgctcatcaacatcatccacatttcagagtctattcattcttctcaccattcacgaagctcctgctcctcaagattcaatcaagaaatcttcaaatgtagctagtgactgtaatcgctgccccagcgacgcaatggttctctggcactctgcaaactttgaagcagccactgctagttccttctcctg

SEQ ID NO: 668 - DNA, 353 bp, Arabidopsis thaliana
cttcttcttcggtacccgaaaagcttcacattgactaaaagagtgattcaaggagagcttacaagtctaaaccagaagcctagtctcaagcttttcgacaagatccatctcttttctcagcttgggaaatctgttcgttacgatttcgtctctaatgatttggtatcaaaggcttgcgatccatatccttataaaaacgatacctttacgagctctggaagtggtggtatcaatgtctataaagagaaaggattctgtgatcttcttcaaagagttactaaccgcgcgcctctaaccgttgtacctaactggaaatgccacggtacagatgagtactgcagcaagttaggtcc

SEQ ID NO: 669 - DNA, 352 bp, Arabidopsis thaliana
  misc_feature (1)...(352): n = A,T,C or G
agagtagagacacattgtccatcaacaagaaatggagatcaaattgcattgtgagatttgttgtatttaattgcaatttgaaattcggatttgtgacattggccccaaacaaaaaaaaaggtacaaaactcttttgtggcttttggaatgatggatcactngccagaataaagtcgttggcaacgccatgatggttctagccgagcctcaatgccaacccaatgtgcagagccgcngntatagaagcagcggccatgataacangnacttaagccattggcctttcgttgaccgcgaccaacggccacgtgctgtggagcgtttcatgtgttgtaatggttgttgaggccac

SEQ ID NO: 670 - DNA, 352 bp, Arabidopsis thaliana
  misc_feature (1)...(352): n = A,T,C or G
aacaatggcgataattccgttagcacagcttaatgagctaacgatttcttcatcttcttcttcgtttcttaccaaatcgatatcttctcattcgttgcatagtagctgcatttgcgcaagttctagaatcagtcaattccgtggcggcttctctaaacgaagaagcgattcaacaaggtctaagtcgatgcgattgaggtgttccttctctccgatggaatctgcgagaattaaggtgattggtgtcggtggtggtggtaacaatgccnnnnaccggatgatttcaagcggtttacagagtgttgatttctatgcgataaacacggattcgcaagctctgttacagttttct

SEQ ID NO: 671 - DNA, 352 bp, Arabidopsis thaliana
ggtcgcggccgaggtacagtctcaagctcgcatcaaaagctggagctgttccttgttccacccactcactaaatttattatcgtcatacggttcagacccgtaaccatgagccttgtagtagtcaatattcgtgaggagcgtctcgtcgatatcgaagatccacacgtccttgccgtcgccggtaatttcaaccgatttcgcaaacgcgagagcataatcgacgatgacactgtaatcggataaaaactggtctccgttaagatactcggcgacggaatccacgcagattgacggaatcagatcccaagttccgacgttattggtctacctgcccgggcggccgctcgaggt

SEQ ID NO: 672 - DNA, 352 bp, Arabidopsis thaliana
acctctttccatggaaacgtcagcgtaaatcacttttttcttatcattttcgacctcttctttttctgttccattgacgacagatctcttaattctagcatggccttcaataaattgatcaaccatcttctgaaggttttcatcaacttcaatactttcaatgtcagcaccgcatagagggcagtccttaaaccgtgttaagcatactttgcagaacacatgtgtgcaaggcacacatctactgctctcatatagaagtgcttgacataacatacagctaaaaggcccaagcttgaatgtttgagagtcatagccaaaagggcacttggcacctgcccgggcggccgctcga

SEQ ID NO: 673 - DNA, 352 bp, Arabidopsis thaliana
tcgagcggccgcccgggcaggtcttccatatatcacagccatggtggttgtcactcacatctccacttccttccaccaaatctctccttccttcttccatctccgtcttcgtaatccctccaccacttcttcgtctcgtcccaaactcgacggtggtttcgctttgtcaattcgagcttacatagagaaaccaaactctttctccaccttcgctaacaaagtcatcggttctcttcccgttatcggactcctcgctcgaattatcagcgatgaaggcggcgttggtagagatctcgtcgatttcgctgagtttaggaaacgagttgggaataaatgtacctcggccgcgacc

SEQ ID NO: 674 - DNA, 352 bp, Arabidopsis thaliana
ccacgcgtccgatctatttgcctaactcttgaaggcaagaatcttggccctgaatgcctcatttttcctcaaaactggtggacactttgttatctcaatcaaggccaactgtatcgactctacagttgcagcagaagcagtcttccagagcgaggtgaagaagctgcaacaagagcagtttaagccagcagaacaggtgactctcgagccgtttgagcgtgaccatgcctgtgttgttggtggttaccgcatgccgaagaaacaaaagaccccagcctcatagaggaactgtggacagtagtgcctgtgtattaagacttatttactgggttttgtttttatctccttgctt

SEQ ID NO: 675 - DNA, 352 bp, Arabidopsis thaliana
ctttttttttttttttttttttttgagcagcgaaatatacaggttacaccctaaatatatttcaatcccacaaggctgctaattttagtttacttacataacaactgttgatgcatattcccaaagactaaacaccaatccaaatccactaagaaaaacaaaacacatctcacaagtgaatgagctcattgtttttagacgatttctgcttcttctgatcatttccagaggcagatgaagaatgacccaaactattctcaccaaatattatctcatccagatcattcatcatcatctcatcgctgctgcttccgcgagagtctttaggtttagtagcaacacggacgcgtgg

SEQ ID NO: 676 - DNA, 352 bp, Arabidopsis thaliana
tcaaatctgtgaacctgaagaacacaagaatgcagctcatgatcaaaattctgaaagaagcgaaacttcgccaacccaagatttaagaacagctacaccatgaatagatatttgagatcatcaactgttaatcgagttgcagagcttccaccatgatcttcaccaaaggcagacgcaaccatttttcttttctcttcctggagagccaaaattctatcctccacagtattttttatcgtaatacgagttacagtaacaggtcgagtttgtccaatacgatgtgctcgatcaatagcctgatcttcagtagttggattccaacatagatcaagaagaatgacatgacatgcag

SEQ ID NO: 677 - DNA, 352 bp, Arabidopsis thaliana
cctctagagcggccgcccttttttttttttttttttttttacttaaaaaacagcactttctgcttttgcttatgcttatttccccattgtacacaacaaaatgcttctacaaacactttaaaacatggttgcatctttcatccgaggtggtgtgaccgtagacaaactctaacctcgtgttcttcctccactcctcctctcaattttggaaccacaatctctaaaactggtccagtcccatcaaagtatgcttcaatatttgcttcttccggaatccgattcggcaattgtatctccctcatgaattcccctggaggacaatgctcagccatctgatcaaccagcttgaaag

SEQ ID NO: 678 - DNA, 352 bp, Arabidopsis thaliana
ttttttttttttgaaaactatagtactttaatatttatacaataactttggaatcgaagcagacatcctcagtacaataatgagaaattgtcacatttgaaagcaagcgctcaataaacattacattaaacaacatcacctataacaacattataaaccggcctctatatgaatctatctcttcttacacatatctacaagtagctcttaagccatacattcacacttagtctgaaaatcatccacctttcctctccaagaaagacagcacggaatgggtttaagctacataacttacacagcattgcggttctcgggattattttcagaccctctttgatctaggtggagt

SEQ ID NO: 679 - DNA, 352 bp, Arabidopsis thaliana
tttttttttttttttttttttttttttggtcacggaattatttacttgcagagaagaatgacagattgaggctgcttttgcagggttaactcagaatcggtaggagaagaacaatgggagatggtgcagaggaaagggatgcaattcactctaaatggacaaccattctatgtgaatggcttcaacacatactggatgatgactcttgcagctgacaattccacgagaggcaaagtgacggaagtgttccaacaagcctctgcggttggaatgacggtaggcaggacatgggctttcaacgatggccaatggagagctctccagaaatctccctctgtttacgatgaagagg

SEQ ID NO: 680 - DNA, 352 bp, Arabidopsis thaliana
aaaagctgagaagaaggcacaggagaaggagcataagagaaaagaaggagagagaaagcttaaggaatgggaagaaaccctagcgaacgcgacggaggaagagaggctgaagcttattgagtcgaggaagagtctgcggaaggagagaatggagaagagatcggaggagaaggagaagaagatagagaggctgaatcaagctaaagaaataggtcaaaagatcgtagtagatgttgattttgctcatctcatgtctgagtctgagatctcaagcctcgttcagcagattatgtattgctatgcggtgaatgggagaagcacttcaccttgtcatctatggcttacaggagtc

SEQ ID NO: 681 - DNA, 352 bp, Arabidopsis thaliana
  misc_feature (1)...(352): n = A,T,C or G
gaatcgaattttgaagctttcttttatgtctgacaagatatctccgttttgttgtcaatctggttgcttggaaaacacnnnnctacatccagaattaaggactactactagttcctccatcactttagggtctcgcatcttcaaaccggagatccctcctctttctctccacttttttagctaagaagaatggcgctgcagaacattggtgcttccaaccgtaacgatgccttctacaggtacaagatgcctaagatggttaccaaaaccgaaggcaaaggtaatggcattaagaccaacattatcaacaatgttgagattgccaaagccttggctagaccgccttcttata

SEQ ID NO: 682 - DNA, 352 bp, Arabidopsis thaliana
gtttttgctgaattttcgaagctttgtttcttcaatctttgatgctagaaaggtgttttctgcaacaagcaatatgcgacaaagaaatatgatgactggttcagacatggagcagaattctcaaagctttgttccccatcctgaacctcgcattggaactaactatctgtatccagatatcccaccagtgaacactgttcctcatttagaagctcattctctgcaagaaccttatgacaacaactcaatgttctacgggcctccacagtaccatcatcaacatgcttcaaatcttggttctggcatgtcaaccgcaccaaatttctatgtcccttatgtgaattatgaagct

SEQ ID NO: 683 - DNA, 352 bp, Arabidopsis thaliana
tactttcaccaccgagccatcgactgctcctttcactcctcctccagagcttgcacgtctgactgccccttcttcacctgatgtaccttatgctcgtttcttgacttcctccatggatctcaagaactctggtaaaggtcattacaatgatcttcaagctacttattctctttatcccggaagtccagccagtgctcttagatcaccaatctctcgggcttcgggagatgggttattgtcgcctcaaaatggtaaatgctcaaggagtgattctggcaacacattcgggtatgacacaaatggagtctcaacacctttgcaggagtcaaacttcttctgtcctgaaactttt

SEQ ID NO: 684 - DNA, 352 bp, Arabidopsis thaliana
ccacgcgtccgatctctctctctctttgaagcagtttgttacttcttacttttgtgtttcttcatattcttcagaagcaagcacaaggctagggatcgaagaagcggcgatcactgatcgtatctcactacgatcacattaatggatagaatgtgtggtttccgctcgacggaagactattcggagaaagcgacgttgatgatgccgtccgattatcagtctttgatttgttcaaccaccggagacaatcaaagactgtttggatccgacgaactcgctaccgctttgtcctcggagttgcttccgcgtattcgaaaagctgaggataatttctctcttagtgtcatcaaat

SEQ ID NO: 685 - DNA, 351 bp, Arabidopsis thaliana
ttttttttaataaaattaaaattccaactttatttctagttcacatttgacacttcatcacacgtataaatatcgtcgtgtgtccttagaaatttacacacgaaaagttagttaagcagcaacaaaaaaaaaacatggagaaacagaacattatctcaaacacttcttcttcttcgtcttcttggattcgtggttcttgtgttggaagaggttgttttggtacagtaagcaaagctttgagtaaaatcgacggtggacttttcgccgtgaagtcgatagatctcgccacgtgtcttccttctcaagcagagtcgttagagaacgaaatcgttattctacggtcgatgaagt

SEQ ID NO: 686 - DNA, 351 bp, Arabidopsis thaliana
  misc_feature (1)...(351): n = A,T,C or G
atggttcttcccatcacattaaaaagggttcacttattgaagttctttctgacgatagtggcatcagaggttgttggtttaaggctctggtattaaagaaacacaaagataaggttaaggtccagtaccaagatattcaggatgcagacgatgaatctaaaaagctagaggaatggattttgacatctcgggttgctgctggtgatcatctgggggatcttagaatcaaaggacggaaagtagtaagaccaatgctgaagcccagnaaagaaaatgatgtatgtgtcatcggggttggtatgcctgtggatgtgtggtggtgtgatggatggtgggaagggatcgtggtgc

SEQ ID NO: 687 - DNA, 351 bp, Arabidopsis thaliana
  misc_feature (1)...(351): n = A,T,C or G
ctcaagctgctcacaatgttgtaaaactgacagttgaagacgatgctgacatgacgaaaaatattgcagacactgagttccttggatatgacagtctctctgctcgtgctgttgtgaaaagtcttttggtgaatgggaagcctgtgataagggtttctgaaggcagtgaagtagaggttctgctggacagaactccgttctatgctgaatcaggaggtcaaattgcagatcatggttttctttatgttagcagtgatgggaaccaagagaaagctgttgttgaggtaagtgatgtncannngtctcttaaaatttttgttcacaagggcactgtaaaaagtggagctctag

SEQ ID NO: 688 - DNA, 351 bp, Arabidopsis thaliana
ctgcaatttcgtagctgtagctcttggtccttacgtttatgtcctcggtggctctgcttttgatactaggtcttatcctcttgatgttcctttgcctacttcttctgtgtttcgttacagcttcgtgaaatcggtttgggaacggttatctccgatgatgtctccgcgtggtagctttgcttgcgctgcgatgcctggttcttgtggtcggattattgtggcgggaggaggatcacggcacactctgtttggtgctgctggaagtagaatgagttctgtggagatgtatgatgttgagaaagatgagtggagagtaatgaatgaattgcctaggtttagagcaggatgtgt

SEQ ID NO: 689 - DNA, 351 bp, Arabidopsis thaliana
aaaacgcttttcaatcttcgtctatctgtctccacgatccacgccttgaccttcgttttttttttctcagagattagagaaaactccgataaccaatttctcaatcttttcgtagatccaacttttccaggaaaaaaagaggttccgcgaagaagatgagttttcaagatttagaatcgggtagaggaagatcaacgaggaaattcaatggtggtcgacaagattcgacacaagccgttgcttctggaatattccagatcaataccggagtctccacgtttcaacgactcgttaacacacttggtactcccaaagatacaccggagctccgggagaagctgcacaagacaa

SEQ ID NO: 690 - DNA, 351 bp, Arabidopsis thaliana
ccacgcgtccggaagaagaagaagaagaaggagaaaagatgatttaccgaaagtggagtttgctgtccggcccaccggttatcctcggcggagcggtaattgctgccgtcgccgtcggattcgtcttgcaaaacgtaacgaaaggggagcagaagaagaatgtctcaacaaacaagtgagaagacaaatggagagatgctacaaaatgtggtgatcatgtgatttgatacaatttagttcttgcagtgtataagctcaataatgcttttgtaagcttttgaatacacagatctttgtggtgtttttagattcttgttactaataatgatatttcattttccaaaaaaaaaa

SEQ ID NO: 691 - DNA, 351 bp, Arabidopsis thaliana
  misc_feature (1)...(351): n = A,T,C or G
acgtcgcatgcacgcgtacgtaagcttggatcctctagagcggccgcccttttttnnttttttttttttttttttttttttttttttttttttttttttttttaactgaaaaactttacattaccataacatcaagatgcaaaagttgtatctacagatagaccgagcgaaatcaaaaaggacaaaaaccaaactaaaaagaagaattttgcttcacaaaaaaagctcaataaaaaataaaatnnnttcagagatttagaaatgtaacaaataaagaaccataacgaaagaacaaccttcaacaatacaatgatgtcttgccgctgcttgcttttgcttttgctttttcag

SEQ ID NO: 692 - DNA, 351 bp, Arabidopsis thaliana
tttttacgaaaactttttcaagtatataagatcctaaatgttagtgtacataagggcgaaagaagattacgagccaaatccctcagagtctttttatggcttatgaacaggaaagaatattatcggtcgagtcaaatcatggaacctttcatctttaggaagatcaatggtccgttgatatctctctctctctatgctttttctgggaataccttaaggaggaaatcgatgaatcgtttagagtaaagtgtaggctcgatggctgaaattgtcattggatcatatttcatagatttgcaagtatgttccactttcttcttcatgttgtactcttggaggatgtcaatgatg

SEQ ID NO: 693 - DNA, 351 bp, Arabidopsis thaliana
  misc_feature (1)...(351): n = A,T,C or G
ggtgatttgcatacactaaggcagagacaacccgggaaacgcttcaccgagcaagcagctaagttttatgtngcggaagtgcnnnttgcaatggaatatttacacatgcttgggatcatttaccgtganctgaaacccgagaacgttcttgtgagagatgatgggcacgtgatgctttcggattttgatctctccctgagatgtactgtgagcctctctatagtcagatcagctaatgttggatccgaaggcttgtcgaagaattcggtttcttgctcgcaacaacctgcatgcatccagcaaccatcttgcatctcaatggctccaacatcttgcttcggtcctcggttc

SEQ ID NO: 694 - DNA, 351 bp, Arabidopsis thaliana
  misc_feature (1)...(351): n = A,T,C or G
ggtgctttacttcaccggagccaccaacattctctacacctttggtggccacgccgtcacagtggagataatgcacgctatgtggaaaccgcaaaagttcaaggcgatatatctactagcgaccatatatgtactaacgctaacgctaccatccgcgtctgcggtttattgggcgtttggcgataagctactaactcattccaatgcgctctctcttctccctaagactggttttagagataccgcagngatcctcatgctcattcatcaatttataacgttcggattcgcgtctacaccgttatattttgtgtgggagaaattgataggtgtgcatgagacgaagagcat

SEQ ID NO: 695 - DNA, 351 bp, Arabidopsis thaliana
tgatgaacaaagtcgacgaaatcgaggatttcagattcgaggatctcgaaatggagacggagaaagataaggaaaggatgatgacgccgacgacgagaatgtcttattcatcttcgtcgtctccgtctccatcttcggcttcatcatctgctgcgtcctctctcgctgccaaggcaattcgagcatcttctgcgcatagagactcttctctttcttctgcttactcgtctccttcttctgctcctgttcccactcctcccaaggaggtgaataaggcttatgagtatacttctatgaagagtttgaatgaaccaaaacgaggcttttggggaagtttagctagtaaagcta

SEQ ID NO: 696 - DNA, 350 bp, Arabidopsis thaliana
tttaattaaaaactaaacctttattgcttttttctaaggaaacaacaattacacgagcttttgacaaaatgtgaaacacaaaattataagagcttagcataagaaacacattgtaaaatgtaagaaacaactcttcaagacttcacaaatcgaatcttgagactaaaatttatatgaaagcgaaagcaaaaaagcacaaacaatgaaagtaagaaacaagaatcaaccaggttttgccttgtgattagacaaaggcaggcatgtccttgagccatgggtcaagtggcttaccaatggagtaaacaatgaaaccaatctctcttaacttgttaacattcataatgtttctt

SEQ ID NO: 697 - DNA, 350 bp, Arabidopsis thaliana
  misc_feature (1)...(350): n = A,T,C or G
ctttttttttttttttttttttttttttatatccgactaaataaataattaattaaataaataaacagaggatatagtccataacaaaataagaaatgccaaaaaaaagagagtaaaattattacataaaccatttccactttaatacactcaaaacaaaattgattttaagcccaannnntaatggaacactcccaaggaagagtagggaacntctcactgtctttgcaataatcgtatacgacgagattacgctgcacccacgcataatccatcttctgtgtcttggacaaatgccacgcgtcgtactgatcccaccaattctctgttgtggtagagacgcatgcagg

SEQ ID NO: 698 - DNA, 350 bp, Arabidopsis thaliana
aaaaggaaacagctttggaaggttgattccattacagattcgattcgaaactatggttcagatttccgatcttccacgggatttgacagaggaggtgctctctaggattccggtgacatctatgagagcagtgagatttacttgcaaaaagtggaacaccttatcgaaagatcggagctttacaaagaagcacctgcgtggagcaagagcagcagcaaagaagaagcagacgaaggagtttcaggtgatcatgatgattcaatttagggtttatttatacagcgtcaacctccttaatccatcaatagagcgtataggtaaacttattagcctagacgttgaagatcatg

SEQ ID NO: 699 - DNA, 350 bp, Arabidopsis thaliana
gcggccgcattcttcttcactatgcataagttgagcagaagcaaccgtgacaaacttcagcagttcgtggctatcacaggagctagtgagaagaatgctcttcaggctctcaaagccagtgattggcaccttgaagcagcgtttgatgtgttttacagccagcctcaaccaagaagcaatgctgctgaagtaagacgcttggaggagctctacaatagatataaagacccgtattctgatatgattcttgcggagggtatctcggttctgtgtaatgatcttgaggtggaaccgcaagacatagtcacgttggttctttcgtggcatatgaatgctgcaacagcgtgtga

SEQ ID NO: 700 - DNA, 350 bp, Arabidopsis thaliana
cttttttttttttttttttttttgataataaaagtatttgatgttatggtctcgatattaaaattcaatttctttcagtgaataaggggctatgtaagtgtttacatttcagggttcaaactcaatctagcctatgatataaaagatattcttgcgatgtagatggtcaccttttgaaacttgaaagtctcgaatatcacccattacccgggaacatcccctccatgtattcatcgaagttttcatcatccttgccttctctatcagcactttccaacttggactttcttgttttcccttttctcctatcctcttcgtcagtgtcatattcactgtgagattgactccga

SEQ ID NO: 701 - DNA, 350 bp, Arabidopsis thaliana
tttttttttttttttttttttttttttttttttttttttttttagtgaaacaacagcccattcacaagaatccacatgaaaaacaaaggctggaaaattcttttaagtctaaaactctcactactttttaataggaacatttttgaaggaggaccccataaaccccaaatatctctcccatgattctgcaagttgttgagaatgatgtttgcttcttcacttgtttcttgccttgttttcccagcatccattaccaaatatctcctccatgattctccgggttggttgaagatctttgccatttgttggaacattcaaacacctcgaagcatcccagaccggacgcgtgg

SEQ ID NO: 702 - DNA, 350 bp, Arabidopsis thaliana
  misc_feature (1)...(350): n = A,T,C or G
ttaattacaaataacagaggaaaatgaaacacatcacacatcttcatagttcatccaatccaaaaggaaactaaaaaaaaaggaacattcacacagcccctctcaccggcaagaaaaccaaaccatacttagttaccaatcacttgagtagagtgttgggagtgaagaagaagatatcatcaagcctatcattgctcggcgagttcccgccataaaccaacagnnnttgcttaccatctcgtgatccagctgcaaacgcgcaccatcctctaggaccgggatgctccaccgatccaaccccatcctcccatttcctccattccagcgtctctgtatcaagcccataagcg

SEQ ID NO: 703 - DNA, 350 bp, Arabidopsis thaliana
cctctagagcggccgccctttttttttttttttttttttttttttttttttttttgatgagaaagatgctatgtctgagttataatatcctcaacacatctgtgatctctggtttctgagatatcaccgaaaacactttttaccataaatacatatctcgagttttactcaaaaagaaagatatagaaacgaaaagaaaaggatatcttgattttctgtgatcaaacccaattttacaaagatgctcatgtgtgtcaccttattgcataatggctctgagtgcatccttcacgtatttatacttgaattcaaaaccaagctctttggctcttacaggtaataccttctgt

SEQ ID NO: 704 - DNA, 350 bp, Arabidopsis thaliana
  misc_feature (1)...(350): n = A,T,C or G
ggcattgtttgtatagagtagggtatagaaacgtgattgacaagggagtagagctgaacaaagacggcatcgagactcatctcatgatggaaacttcangacatggtgcggttaaggagaatcacttcttggatgatggtgcatacatggtggtgaagatcataattgaaatggtgagaatgagactcgcgggatcaaatgaaggtatcggtagtttgatcgaagatcttgaggagccgttagaagcggttgagcttcggttgaatattttatcagagccaagagatgccaaagcaaaaggcattgaagccattgagactttcaggcaatacattgaggaaggaaaactg

SEQ ID NO: 705 - DNA, 350 bp, Arabidopsis thaliana
  misc_feature (1)...(350): n = A,T,C or G
tgatctgaaggagtttactcgatcaagccgagctcgtaggcggtattgggcgaggagttacgctggatggaggaggttcactgcagcacaaccaggaccagctcatactgctttagcatcactagaaaaagctggacgaataaattttatgatcacacaaaatgttgacaggttgcatcatcgtgctgggagcgatccacttgaattacatggcacagtatatactgttatgtgcttagagtgcggcttctcttttccccgagacnnntttcaggatcagcnanaagcaatcaatcctaagtgggctgaagctatagaaagtattgatcatggagatccaggatcagaga

SEQ ID NO: 706 - DNA, 350 bp, Arabidopsis thaliana
aattaaaaagcctatttacattaaaaatgtacagatgacccatctcaccagaaagggcaccacccaacatagttttgacagagattctcatgggaagtggcttgattgattagtttttgaacctgaactttcacagacaaaccatgttcgacttcatgagaatctcctccgagcaagttattatgatcagcaatgggattgctcggaattgcagacgaagaaaaatcacgccctgtaagcttatgactcatacgtgccataacaactacggcacgctcatttaaaacttcattagcatctccaagcatatttacagcctgaagaatctccttctctcgagtactcctttg

SEQ ID NO: 707 - DNA, 350 bp, Arabidopsis thaliana
tgaacgatcggggaaattcgagctcggtacctcgagcggccgcccgggcaggtactgctacttgcatctgagtttatgaattgggacaatggatctgcagattgtgtgtgatctgatgaaaccattgttgtgtttttttgtttcatctcaagaaactagctaaagagatctgttactgcattatctattgatgttgtctatttatgtgtgtttcaggtgatttaagacatttcctcgatgatttgtgatccaactctgtttctcttttgttgttgtacctcggccgcgaccggcgcgccggatccttaattaagtctagagtcaattctcgatacccgatccactggccg

SEQ ID NO: 708 - DNA, 349 bp, Arabidopsis thaliana
ccaaaaaaacaaactggatcaaatgaatatgaacaatgtgcattgtgttgtatatacataacaagaaaacagaggtgatcggtcaaaaaacaaaagaaaaggtaaacgaagacttatctcctgtatcttacagccaacggccattgtggcgaattgggatgaagagctttgagcaaggccgcaaacttgatagcattctctatgctgcaccacttgagcttccatgtaactaaatccactgttctcttctctttgatctttaatgacacaacaattccttgcgtttcaattatcatttcagatatttcagaaatggagcagcacgagccgagcaagaaatatggagctg

SEQ ID NO: 709 - DNA, 349 bp, Arabidopsis thaliana
agcggccgcccgggcaggtactggaggtccagatggtgggagaatgccagcgaggatatcaataccactctgagatgtagcaaattgctcttgaggaaaacctggtgagttcgatggaggttgcacattctgagaagcaggatcaggattggcaacggcggaaaatgagtccccaaagccaaagttatgagcagtatcaggatgtgagacctctgaagtgaaggctggaggtggtggctggaaagaagctccaaaattctgctgtggggttgagtcggtgtcagtagaagtgaaggccttgaaaggagagtcaccaaatgggtcatcaaatgactgagttgatggctga

SEQ ID NO: 710 - DNA, 349 bp, Arabidopsis thaliana
ttttttttgtgacaaaaatatgaaactttttaaaccaacaaaaatgaacaaagaaatcaaaagtaacattctcaagattcacactacggttgtctttgagccaagttttgttggtgcttctcgactttcgctgtttacatggagaacttctgaggaacagtatcgaaatcgtctccaaagtcgtacctttgtctttcccttcctacctttcccaagtataaagggtcacatgataagctctcatccatggctaagagattcttcgacagaccaatagtcctttgtataacagaatccatgatctcaatcatctcactagatttgtactgctcagggtcctccaagaatc

SEQ ID NO: 711 - DNA, 349 bp, Arabidopsis thaliana
tttcggctccagccgcttgttcttcctcctctagaattctctgttctactcctctccttctccttctctctgtcccgccatttccacctctggtaaactcaaaaccctaactctctcttcctccttcctcccttcttactcattaaccaccacctccgcttctcaatccactcgtcgctccttcaccgtccgcgccgctcgtggaaagttcgagaggaagaagcctcatgtcaacatcggaaccatcggtcatgttgaccatgggaagactactttaaccgcagctctcaccatggctctcgcttcaattggttccagcgtcgctaaaaagtacgacgagattgacgct

SEQ ID NO: 712 - DNA, 349 bp, Arabidopsis thaliana
ttttttttttttttttttttttttttttttttttttttttttttttttttttttttttttaatttaaatctcaataaatatataaaaacacacaatacaacaaaataaatactataagttccgttccaatttttgtaaatttatttgtgtacatacgaagatctcgatgaatatagatattagtatttctccaagactatagagtaaactcatgactaaaagcattattttacaaaatcactgacacaaaaagtcaccgacaccgacaaaactaagactttggttttccaccataagcttgcttacaaatgtaaaatggtttctgcgatggagcacacatcttagcttt

SEQ ID NO: 713 - DNA, 349 bp, Arabidopsis thaliana
tcgagcggccgcccgggcaggtacaactccataaaggaatctgaaagcttcaaagccttcaaagctaagacgcctagatcagctttagagggatcatatatgatgcacacacacctcttgatattctcctggtaattcatgaaggtctcaatcagttccacagtctgatacgaaccaagaactgtagattgataccagccaacagtgttgttgtcaacattaacctccctcagacatctcatcatctcaagctgataattagcaccatcagcttcaatttcttcatcatcatccctgaccgggaaaggaaaacaattggtaacttcgaggacgctaccaacatcaagtc

SEQ ID NO: 714 - DNA, 349 bp, Arabidopsis thaliana
tcgagcggccgcccgggcaggtgagagatgtaaaaaagcctgcttccaatgaaatgctgcctcttcctgggttatgaaaagtcttgagctttgatgtttacctttacacacatttctgagtctcatccatgggttttctgttgaaactgagtgtggaaagtgctcgagtgattgaaagacggattgcaagtttggatgttgatttgtatagaaatcaaatggtagggtagtcagaagaaatccagagacttggaagaggtttggagacgcaaacaaaagaagtttgggttaagagtttagctttagagattgatgttttctttattctgagtgtacctcggccgcgacc

SEQ ID NO: 715 - DNA, 349 bp, Arabidopsis thaliana
ccgatctctctcctctctctctctgtatatagaagaatctccattgtctttaatttctctccatttctctttctctcttccttcaaagttttctcttttcttgatgggtttaagagagtaaagatcatcaagtactatgcattaaattgagaagttattaaaaatttcgaaagtaattaaagattgttgatgatgaagagattaagtagttcagattcagtgggtggtctcatctctttatgtcctacaacttccacagatgagcagagtccgaggagatacggtgggagagagtttcagtcgatgcttgaaggatacgaggaagaagaagaagctatagtagaagaaa

SEQ ID NO: 716 - DNA, 349 bp, Arabidopsis thaliana
aattcttcaatctatccatgaaccggagctcatttctgcgttcgacaccggtggtgcagagcttctatacgaaattcgtctccttagcaccacgcagcgtgttgcagccgccacattcatcattgatcgtaatattgattcgaaaggagcacaggatttggcacgagccatcaaggattatcctaaccgtcgtggagacgttggatggttggattttgattacaacttaccaggagattgtctttcattcttgtattacaggcagagcagagagaataagaatccatcggatcagagaacctcgatgcttctacaagcattgggggttgcagaatcagaaaaggctaag

SEQ ID NO: 717 - DNA, 349 bp, Arabidopsis thaliana
gccgagaggatggcatcaatgtgtccaattttggtgccacggaacagcaagatgttggtggaaacggccaatttggtgtagtgttggtccatggatttggcggaggagtgttttcttggagacatgtgatgagttctcttgcccatcaacttggctgtgttgtcactgcatttgataggcctggttggggattaaccgccagacctcataaaaaggatttggaagaaagagagatgccaaacccttacactctggataatcaggtagacatgcttcttgccttttgccacgaaatgggatttgcttctgtagtcttggttggccatgatgatggaggtttgcttgctct

SEQ ID NO: 718 - DNA, 349 bp, Arabidopsis thaliana
gcggccgccaaggaatgaaaaaaacaatccttgcaatatctcacaagacccctttttctttaagagaaggaagatctcacaaacactatctttctctatcttcctctctcttttactatatatgatttatatataaattttgaaaagcattgaacttagaggagaaagaggatgagcactttcactcttctttaattttttgaagagtcttcactttgtctcttcacacctttcttcaactcttcttcaaccctcttttttaatattcaccagagaaacccaaaagtaaaaatgaagataaaagactaaaccttttaacgttcttgacgaaccagaggtaaaaaccaac

SEQ ID NO: 719 - DNA, 349 bp, Arabidopsis thaliana
  misc_feature (1)...(349): n = A,T,C or G
gcgccggtcgcggccgaggtacaaagtccccttgtgtctccacatccgcttttactgnnnngaggaatgttgatcggttctcgatttccccaatcatattgttcctagctgctgatgaattaccagttcctgaagagatcaaagaaggtgcaccttctttcttcgattcacgtttcatcaatgattgataaaactcaacaagctcaggagctcggtgaactttgttcccgcctcccgctcctcttccaagtgctccaggaggaggtggtggtggaggtggtccaccgccaggtggaggaggcgttccaccgccaggtggtggaggaggtggtggtggaccaccaccagg

SEQ ID NO: 720 - DNA, 349 bp, Arabidopsis thaliana
ttttggtggaaactacaaatcgttattattaaaatagatatatgaatctatctttcacatatttccaaagatcgaatttacacagggcataacaaaataacaaaacaaacacatccctttccccaaactccgaaccagacgcgatagatatctacaaactttctttgactacaacaagcttttaatcaccatcaattctagccacgtgtctcgttcacagaccatctaaaattcaaaccatagttttacacgtcgaagtctgaggatcccacaacgccggcaatagatattttctaccggcgagacccaaagcgttgtaactcgctccactcgtcttgtctacgagaac

SEQ ID NO: 721 - DNA, 349 bp, Arabidopsis thaliana
  misc_feature (1)...(349): n = A,T,C or G
tttttttttttttttttttttttttttttttggtaataatcaaactttaggttnaaaaactttcagcatgaaaatccagttatttggaagcaaaaaccaaaaggacccatcttcttcatagaaagtatgttacactgcaaaacaaaatagatggtatacacaaaaaacaagctaaccacatgctttcagtttcttcgataagacaaacccaaaaaacgaagaaagaagacgggttatataccagagaagacgagataagttcactctcgtctagctagattatctatcagcaagttcgtcgttggagccaaagattgatagcgtcgatgtttttttctttttcgatggt

SEQ ID NO: 722 - DNA, 349 bp, Arabidopsis thaliana
tttttggacaaacgaaagttttggtttctgtaatttaatcggagcaaacttcaataatagtaaacaaacaaccttttgtttaacaatgtccctaattttattctgtgatttcgtcattacacatctaagatctgaaaacatgagctcaagaactgtaactcaaatatcacaaactctccaaaacacataaacaacaaacacattgacattgtcagagatcaaatctaagggtttcttctctaagaaaaaaaacaaccatggattagtctcgaagttacacaataacagttcctcaaacgaagctaataacttaaagttaccggatacttgtcaatacaatcttcccaag

SEQ ID NO: 723 - DNA, 349 bp, Arabidopsis thaliana
  misc_feature (1)...(349): n = A,T,C or G
ccgcccttttttttttttttttttaaggagaaactctaactgacttcatatctcaaactgtatacagattacagctatatctctacttcacagacacacacaagccgacatacaccattaccgattttagaactatcataagactgcaacttgtatccagctttagtatttggctacaaacaaaatggcggctgacggacaaaagcacactagtattcaaaggttagaaggaactagctcttcagtcacagtctctcttcattgccttaaaccgaaaanantggccagatataactgtcgacaatcactgtggctttaagattttcttggcttctgagcccattttggt

SEQ ID NO: 724 - DNA, 349 bp, Arabidopsis thaliana
gcggccgcgctaaagcaagatatgaaaagaccagattcaaaatcgttgatttggatgattacgcggctgatgatgatgagtatgaggagaaattgaagaaagaggatgtggctttcttcttcttagccacatatggagatggtgagcctaccgacaatgcagcgagattctacaaatggttcaccgaggggaatgacagaggagaatggcttaagaacttgaagtatggagtgtttggattaggaaacagacaatatgagcattttaataaggttgccaaagttgtagatgacattcttgtcgaacaaggtgcacagcgtcttgtacaagttggtcttggagatgatga

SEQ ID NO: 725 - DNA, 349 bp, Arabidopsis thaliana
cgatatggccgcctccgtagcaaactgctgcttctccgtcctcaatgcctccgttaaaattcaatcttcgtccatctcctcaccgtggtgtttcgtgtccgcatcgtcgttgactccccgagcttcctccaatattaagaggaaatcgtcgaggtctgattcaccatctcctatattaaacccagagaagaattacccaggtagagttcgagatgaaagttccaatcctcctcaaaaaatggctttcaaggcttttgggtcacccaaaaaggagaaaaaagagtctctttctgattttagtcgagaccaacagactgatcctgccaagattcacgatgcatcctttctc

SEQ ID NO: 726 - DNA, 349 bp, Arabidopsis thaliana
ccacgcgtccgctattaacacaccaaaagcttcttcttcttcttcctctcgtctctaaaaatccttcctttctttctgggttttctcgaatcttcatctctcattcaaacccacaagtccgatctcgcgatccaaacaccatggaagaggttgaagaagaagtgagacgaatcgtcgaacaagttaaagagcttcatgactcttccacatccttcgtctcttcttcttctcaagaagagctttctctccgtaacagagcctccgtcgttgactcatcaatccgccgtcttcattctactcttgcctctgacaaacatctcgatcccaagcttttcgaaaagctagaaga

SEQ ID NO: 727 - DNA, 349 bp, Arabidopsis thaliana
aaagaattttgctgcaacggaattgtggttcaagactcagaactcggacaggttattcagcttcaaggcgatcagaggaagaacgtctccacgttcctagtccaggctgggcttgtgaagaaagataacatcaagatccatggtttctgagcagcttctgttgcatttcccgtaggccgtttaagtggatcattactctatcgtgcagttacaaaacatatcttcacctttcccttcgattacttgttacttgtttctgttttagcgttggaatgatactaagagaccatcatcgttttctttcacatgttacttctgtaatacaatacctgcccgggcggccgctcga

SEQ ID NO: 728 - DNA, 348 bp, Arabidopsis thaliana
ttttttttatcagcaaagcatcttttattcattataaattcaacaggttttacaaaagagtttcaggaccgaactagacagactgataataaaagcacaaagatttgaacagacagcatttggtttggtttccatttccatgacaatgtattcattacttagttgggagatttgtaccatccccagggatcgtttgaagtgtagagagtcacttgcttcacactcaagtagttatcaagtccccattctccaagttctcgtccaaacccactgcgtttgacaccaccccatggggcttgggtaaagcaaggctgcgagcagttaatccagacaatcccagcttcaaag

SEQ ID NO: 729 - DNA, 348 bp, Arabidopsis thaliana
ctgatgatgaacactctgcaaagagaaataaaatgttggaagagattgaacgcgaatttgaagctgctacaaaaggtgttgaacaactaaaggctaatgattttagtgaaggcaatgataatgaagaacaatctgcaaagagaaagagtatgcttgaagagatcgaacgcgagtttgaagctgctattggaggtcttaaacaaatcaaagttgatgattccaataatcttgaagaagaatctgctaagagaaagataatgttggaagagatggaacgtgaatttgaagaagcacacagtggtattaatgcaaaggctgacaaagaagaatctgcaattaaacagagcg

SEQ ID NO: 730 - DNA, 348 bp, Arabidopsis thaliana
tcatactctagcttactaatcaaagatgcgagagattcttcacatacaaggtggccaatgcggaaaccagatcggagctaagttctgggaagtagtttgcgccgagcacgggatcgattcgacgggaagataccaaggagagaacgatttgcaactcgaacgagtcaatgtctactacaacgaagcgagttgcggaagattcgtcccacgcgccgtcctcatggatctagagcctggtactatggatagtgtcagatccggtccgtacggtcagatcttccgtcctgataacttcgtatttggtcaatccggtgccggtaacaattgggctaaaggacactacactga

SEQ ID NO: 731 - DNA, 348 bp, Arabidopsis thaliana
aaaaaagaaaagttgattttccatcttataaatgtctttcaaagtttccaaatgttgtgaggattatataagagttaagcagaagcagaggcagccaagagtccattgtgtctgagaagaggctcgggtgaaggttctcgtcctctaaactcaacaaacaccttaagaggcgctttccctcctccaagtgcaagtatggtgtttctgaatctctgtcctgtttctttaacagccttgatgtcgtctagtccagcgtcttcaaatgctgaaaatgcatcagcagacaaaacttctgcccacttgtaactgtaatatccagctgcatatcccccggcaaagatgtgactg

SEQ ID NO: 732 - DNA, 348 bp, Arabidopsis thaliana
ggatctggtattataagatagtggaagcagatcacataatgttcatagtgaacagagagagagctggtgttcagtttgatctgatatacgacagcatcttccaacgttgcaggaaacatgtttttagaaagattcctcagactctccccaatcaatctccttcttctcctcgttcatcatcatcacccagaataaacaactttgtacattgatcacatgcaaaaaaaaaatgttttagggttgttacgttgagggcttaagtttttgtttaggctatttactactaatacagattattcattgttcttcttgttctcctctcgatttgttgtactgtaaaatatatat

SEQ ID NO: 733 - DNA, 348 bp, Arabidopsis thaliana
taggccaatgcaacaagcccttcgaattttagaggtacggtctgcttattgtaaaaacgatttcgaatgggataatatgaagcgcctcgccttcaagaacgtagatgattccaacacaagactcatgcgcgagtacgtcttggagactagccatgtcgaaaccgattctgataagtgaaaccgaatatctcttcgaatcacattcatatatatagagtcttgagagtatacacacttgaaaccgtttgtacatacatatacataccattgtgctatgttactcccaggttttgataccttagttttttttaaaaaaaaaaaaaaaaaaaaaaaaaaaaaaaaaaaaaa

SEQ ID NO: 734 - DNA, 348 bp, Arabidopsis thaliana
  misc_feature (1)...(348): n = A,T,C or G
tatttgagcctgaagatcgttacatttttgatgcttgaaaccgaaaaggaaannnngaaaactagaagaaaagtctacggggagaagacgatttggtagagatagttgatggagactgcttctggtgaggcagagacattcctttgttctcttgttgacctgatgatcccattttgtcaaggagtttagctgctcttggatcagtcagaagtgtcttctggaatgactgagagaagcctgtggcgattatcgttacatgaatctctccggtgtagcgatcatccacaacagctccaaatatgatgttggccgatgggtctgccaaacttgtcacgacctgtgatactc

SEQ ID NO: 735 - DNA, 348 bp, Arabidopsis thaliana
tgtaaccaccccctatgggtaaaacaaaatgcctcagagtcatcaaaaagcacataaatcctctcggaggtttttctactgccttgtcaaagcttaaaccaaaatactgggactgttgagattgggtagatttaatagaaagaaaaatccggcaatcttactcgatgattccggcacctgcatcgagatccacttcgcccataccagtgtcctcttcttcgtctccgctatcttcatcgccgctcatttcttcattgtcaagacgtagcttagccatgtgttctgtcagcatcttttcatcacgttcactcacagctctagccccctccttaacgacaagcttgcctt

SEQ ID NO: 736 - DNA, 348 bp, Arabidopsis thaliana
  misc_feature (1)...(348): n = A,T,C or G
ctttttttttttttttttagacaaagttctattgttattgaaattcaacacaatgtctattgactatgttctctttttatcttgtccctaaatgtttgtgtttgctacagatcttcttccacaattacttcaaacaaagcccatttccattaaacttctaagaacagtactcaacagtactctggatcaagttgtaaaaccttgagaacgataaacaaactcagtacacgagatttgctatcctctttccgtgttcatannttaagagattggattgttcattctcaatcttctcaggcagacgagctctttcttgtggcatacacacggtatgcagccagcccaacg

SEQ ID NO: 737 - DNA, 348 bp, Arabidopsis thaliana
ttttttttatacacactgtaatcaattttattacctgaggggaaaaactgataaaaggaagaaaaagatgaatattttcttcagtaatggtttccctttgtagtgaattatagagattatgaatctgtacagtaaagagggagggctggatactacaaacagacctgtgaccctatgtttatgtatttgttgatgctttttactaaaatgaaccaatcaatcatcagagagccttttgatcaagacgctcgttccagtttaagcaacggattaagcttctaaaccaatcaccggtttgatcagatttgttgacagttgggagtggatgttggctcatgtatattctca

SEQ ID NO: 738 - DNA, 348 bp, Arabidopsis thaliana
cggccgccaaaatcacatatcttctctatcgatctccaatcatcatcttcttcctaactacaggtgtattgatgttctttgcagagatgtctccagcaacaaagtcaaagtctaaggataaaaaaactggtaaagaagctcaaaaggcatcaccaaagccttcactttcggttaatgggaatagcagcttggcagctagtggttataatcctcttttaggaacatttcaagctcttgattcagtgtcgatagcttctatctcaccattacagtatagtcgtttccggagtatagatgaggcagatgtaaatgggattgagtctgattcagtttcgaataatggtagct

SEQ ID NO: 739 - DNA, 348 bp, Arabidopsis thaliana
ttcagacagaccagacatgtcctctgttgtcttcatgttaggtcataacgccattgatcttccatctccgaagcatcctgcatttacggcgggaaggaggagaaacaccaaaactggcggcagctcagataattggcccagcggagaaaccagcagtactattaacgacgttactctcaccgatgttcaaggtcgttaagaagtgtattcctcttctttataatctaagaagactataggtatcaatttatagtaatacttgttatatagaaaattatgtgtttaaagcgtatgcaaacttatttgtataaagtttacaaatacctaatgaaaagaaaagttagcctc

SEQ ID NO: 740 - DNA, 348 bp, Arabidopsis thaliana
  misc_feature (1)...(348): n = A,T,C or G
tggttccaaactaaacccacacttgtcgaagaagcttgtatcttgcatttgaagtcgctgaaccagtgaagtcactcgctttgtcaacaatggatgtaagaggagagtncagttcctcaagctcctcgtcgcttgtgtacccttttctctgtatcatagacacattccttgacaattttgctgaagcctctgcaactttttctgctatatccatggtcgatggaggcatgtaagaaacagaagaagctgcataagggaagcttgcttctgatagcttcctannaccaatgctctctgcagcattaagctcttctaggacagctccgggtacttgatctggacagaact

SEQ ID NO: 741 - DNA, 348 bp, Arabidopsis thaliana
  misc_feature (1)...(348): n = A,T,C or G
agtcaactctgtctccgccatggctgctgcttcactccacacttcaatctcaccacgtagcttccttcctctctccaaaccatctctaaaacctcaccgttcccaaattctactgagaaacaaacagaggaattgcgtttcgtgcgcattgatccgtgacgaaatcgacctgattccggttcagagccgagatcggaccgaccatgaggaaggttcggtggtagtgatgagcactgagacggcggttgatggtaatgaatcggttgttgtaggttttagtgctgcgacnngtgaaggtcagctttcgttagaagggtttccttcttcttcttcttcgggagctgattt

SEQ ID NO: 742 - DNA, 348 bp, Arabidopsis thaliana
atgtccttcaccgtgatggttctgttctgatgtcgatttctctggatcaactaaaggcacctgaactcctctacagatcactcgctacaaagcttgtcgtgggtatgccattcaaggatctggcaactgttgattcaatcttattaagagagctaccgcctgtagatgatcaagtggctcgtttggctctcaaacggttgattgatgtcagtatgggagttatagcacctttatcagagcaactaacaaagccattgcccaatgccgtggttcttgtcaacctcaaggaactatctggtggcgcttacaagcttctccctgaaggtacctgcccgggcggccgctcga

SEQ ID NO: 743 - DNA, 347 bp, Arabidopsis thaliana
tttttttttttttttttttgggtcgtaagacgattttataaaaggcctcaaacggacatagaaaacagtacatatcaaagcccaataggcccacacattggtttatcaattattcaacttatttttgactgaaaagggaaaagttgatgagtctttagtgtttgtgagactggatatcttggcttcatcaatccttttatgtttaaagacttcttctatcttgaaacaggttcactgcgagctgagtggtttttacggatgattacctcttgcggcatatggtcataccatcgccgattgataccatactaatgcttacacgttgatcatccattaattttttgttg

SEQ ID NO: 744 - DNA, 347 bp, Arabidopsis thaliana
cggccgcccgggcaggtcgaggctctaggccgtgcaggtcttgaatcttctaatctaatcgttggtattgatttcaccaagagcaatgaatggacaggggccaagtccttcaataggaaaagcttgcatcacttgagcaataccccgaatccatacgagcaagcaattactatcattggaagaaccttagccgcctttgacgaggataacttaattccttgttatggttttggagacgcatcaactcatgatcaagacgtgtttagtttctatccagagggaagattctgtaatggatttgaggaagtattggctcgttatagagaaattgtacctcggccgcgacc

SEQ ID NO: 745 - DNA, 347 bp, Arabidopsis thaliana
  misc_feature (1)...(347): n = A,T,C or G
cgcagagctcaaatcgtggtcccacatcaagagaagaagttttgtgcttcttgaacgagcttggttggcttttccagaagaatcagacctctgagcttcgggaacaatctgacttttcccttgcccgcttcaagtttttgctagtttgctcagttgaaagagattactgtgctctcatcagaacgctcctcgacatgttagtagagagaaatttggtgaatgatgagctgaacagagaagccctggatatgcttgctgagattcagnnnntgaatcgtgctgttaagaggaaaagcacaaaaatggtcgaactactcattcattacctggttaaccccttgacactc

SEQ ID NO: 746 - DNA, 347 bp, Arabidopsis thaliana
gccgcccgggcaggtacaaatcctgtcttcttcaacccaagtctggctccaccactcgccgcctaaacccttctctcgttaaccctcttacgaatcccacaagagtttccgttttggggaagagtcgtagagatgtctttgcgaaagcttcgattgaaatggcggaatcgaattcgataccttccgttgttgtcaattcctctaagcagcatggtccaatcatcgtgattgataattacgacagcttcacatacaatctctgccagtatatgggagagctaggatgccattttgaagtttaccgcaatgatgaacttacagtagaagagctgaaaaaaaaaatccaa

SEQ ID NO: 747 - DNA, 347 bp, Arabidopsis thaliana
ctcgagcggccgcccgggcaggtacctctgttacagtggacttgcaagtgaaccccgggattacgagtgcaatggtctccacaatcactctaaagctgtttcaacaggcacaatgaccattggcttactcacaactgttctctcggttgtttattctgctgttcgtgctggttcttccactactcttctctcccctcctgattctcctcgcgcagagaagcctctgcttccgatagacgggaaagcagaagagaaggaagagaaagagaataaaaaaccagtttcatactcatacgcattcttccacatcatcttctcccttgcgagcttgtacctcggccgcgacc

SEQ ID NO: 748 - DNA, 347 bp, Arabidopsis thaliana
ttttttttttaacgaaatcaatagagaaaatgtcaatatatacgaagattacaaatatcccacatatccttctcagagtagaaacgatcaattgtattaatgttgcattgaaaacgaaaaatagtactaaaattccgccatatgacgatcgtacattaactattacattgctacatataaataagggcatcgccagtttttaaactgcgaaattattcaaagcgagatgacgaagaagacgaagaagaaggacgaagcaagtcaaatgtgattaaccatatcgagtatcaagcaaagaaaactcttcagagcctagcggtacgaagttgctgcttaagcacaggtcg

SEQ ID NO: 749 - DNA, 347 bp, Arabidopsis thaliana
tcgagcggccgcccgggcaggtgaagaaactggtgatttcatctccttcgatcactcccaagattcgcattacctttcttataatcgccgagattgttcgagcctgaataatcaaaatggttatgcttgctgctgccattgtggtcaagtctgggaaagtgattgtttccagacactatgtggatatgtcccgtatcagaatcgaaggtctacttgcagcttttcctaagctggttggaatgggaaagcagcatacctatatcgagacggagaatgtgcgatatgtttatcagcctattgaagctctgttcctgcttcttgttacaactaagcagagtaacattcta

SEQ ID NO: 750 - DNA, 347 bp, Arabidopsis thaliana
  misc_feature (1)...(347): n = A,T,C or G
tcgagcggccgcccgggcaggtgtgtttcggctcggtctagaacaagatcgcaagacttcaagatgccgtcgcacaagtcgttcatgattaagaagaaattggggaagaaaatgaggcaaaacaggcctattcctcactggattcgtcttcgtaccgacaacaccatcaggtacaatgctaagcgtnnncattggcgcagaaccaagcttggattctaagaggtttacttttgcttattgtgagagctttgttcttttgaaaaagactttgttttctttatcagttttgattgttcacatttgtgtaagacgatctttaatcatttatgtttccaaagtttccattg

SEQ ID NO: 751 - DNA, 347 bp, Arabidopsis thaliana
  misc_feature (1)...(347): n = A,T,C or G
tgccaaatgtttgaacgatcggggaaattcgagctcggtacctcgagcggccgcccgggcaggtactgagcatcgtccacgggttgaattgtgacgtttgtcatcttcctggatatatttctagggatttttcgtttttctacttgacattatcggattataagtgttttttcttcattttccttttggatttgtgttttgattttgattgggttttgttttttagaattgagtattttaaaaacacgcccaaataaaaaagtcatttgagnttatttctgttgaacctcttgtggaatttgaaaatcagtttctgtcgaaaaaaaaaaaaaaaaaaaaaaaaaaaa

SEQ ID NO: 752 - DNA, 347 bp, Arabidopsis thaliana
ttatgtgggttagttatgtgtgtatatgatatacaaatcaaacaacatatataaggagaagagatattgaatgttgattcttaatttacaggaacatgaagctcgggtctttccggcaatgccatcaatatccgaggcggtgcagtttcttcgtcagacgagaaaccagagagtctagtatccctctcttgcctgcaacgttgtataacaatgaatgacttgaaaaatacataagcaatcaacaagatgcctaatgttctcactaatggtaacatgagcaaagttatcgagaaatcatcgactccacctagtaaaactggaagagaatggcgcaggaagagcagaag

SEQ ID NO: 753 - DNA, 347 bp, Arabidopsis thaliana
gcggccgctaaagagtcagaaaatttaagaacatctgcttcatatcgtacatggctggctattcaagtaactaaaacatttgaaaccctgatctacaattattgaggaaaaaaaaagataaacaattttcaaagaatactgttttttcctttttctttttacttctttaagagatacagaaacaaagaacctttcttaattttcgccttctaattgcaatgaaccttctctcattaacttgaggctcaaactgttgaatctttcccgggaatactgcctcgacgctttcctccaatctgttccagctttcatcatcgccgcaaactcttcatagcttattcgtccgt

SEQ ID NO: 754 - DNA, 347 bp, Arabidopsis thaliana
gcggccgcaatggtacttgactccatcagtcgtctccctgatggggggtttgctaccctttggaagcatcttcattgagatgtactttgtcttcacatccttctggaattacaaggtctactatgtgtatggattcatgttactggtttttgtgattctcgtcatagtgacggtgtgtgtgacaatcgtgggtacatatttcctgctgaatgcagagaactatcactggcagtggacttcatttttctctgctgcttcgacggctgtctatgtgtacttatactccatctattactactacgtaaagaccaagatgtccggattcttccagacaagcttctactttg

SEQ ID NO: 755 - DNA, 347 bp, Arabidopsis thaliana
gggttatcacttatcactgttgaaataacatttccagtgtcagttcacgatgtgaagtaggttcaagcttatcttgcttgtgtctagctgcattcctttttatctacgaatattctttactgtctgactgtcattctttgtggtgtgtatgatcagaaggttgtttgaattccttttgctttcggatgctttggcaaagcacacgtagcctccgattctcaccaagaggcaggccttcaggttcttgctatgattctggttcatcctctttggcttattgaagtatctttgaccaagtgtctcataggtttaagcagctgtgcaaaacgtagcggaacgtgtgccct

SEQ ID NO: 756 - DNA, 346 bp, Arabidopsis thaliana
ttttttttaactgaaattgctgtttcattacacgtacactatatgaggaaaatgtagtttttttttttgttgtttccttgtaagagaagcgtaattgaaaagtatttcgaagtaagtaagacaaatataaagtctgcaaaactagccaatccccatgggaaggataaatctctctctttctctcttgctctctctctatttatctccctttttgaaccattcacaattccacatcacctccttttcaaaacagctctggatcactctgcctgaaccataaccggctttccccgtcccattgagaatcctctggtcccatcaggcattcgtggtccaggtggttgct

SEQ ID NO: 757 - DNA, 346 bp, Arabidopsis thaliana
aaaaggaatggcactgagaatgtgggcttcctctacagcaaatgctctcaagctctcttcttctgcctccaaatctcatctcttgccagctttctccatctccagatgcttctcctcagtgttggaaggacttaagtatgcaaattcacatgagtgggtgaaacatgaaggctcagttgctacaattggtatcactgaccatgcgcaggaccatttaggagaagttgtgtttgtggagctgcctgaagcaaacagttcagtgagcaaagaaaaaagctttggagctgttgagagtgttaaggccacaagtgagattctatctccaatctctggtgaagtcattgag

SEQ ID NO: 758 - DNA, 346 bp, Arabidopsis thaliana
accaatggatggaggcttgggaacgatgttgatgaaggttgccttatttgccctagttcaaggtttggtgtatctcatcctcttgaaatcgtcgagggtttttgctagatcgaattcgttgaaaagggcttacagtttccgaccgatgaggtcagtcagcatccgtcggattctggcggcgcttcaggatattcctgctggcgacgatatgtctccttcatctaacggctcttcttcttcttcgcaaggtgaggcagcaacagcaacaactacatcatcatcaccatcttaggcagcaacaagaacaactacacggcattatttgatatatttttcattttctttt

SEQ ID NO: 759 - DNA, 346 bp, Arabidopsis thaliana
tcgagcggccgcccgggcaggtggcgacgtgggtggtgaagagagctgttgcaagagtcatttctggtcggagtttcggtggtgatgagagtaaggtgtgattggttcggttgtggagtgttttgggtttgttacgacgatcattgttgtcgcttgggtttgtgattagagaacgttcttcgacgacggcggagttgatacggaggagagtaggagaggaagatcggcggcgaagaagagagtgatgaagagagaatgtggaggagaggaaggaagaagaagaaacagagtccattgctctccttttgtttttactttctttggctccacgacctcggccgcgacc

SEQ ID NO: 760 - DNA, 346 bp, Arabidopsis thaliana
tcgagcggccgcccgggcaggtacccctttgtgcacggatgcagcccaagcaatagttgagtaagttaaggacataacagccgcggcgagtgagatgatggagatagagttgaaattgggaaggtgagagataacaaagtggacggaagcaaagatcatgatccaaaacgtagttctgatctctttgcaatcgggacagactagttgatggactttcttgagggatgctcctcctgtgaccatataaacgatgtcaacaccgacctccacgataagctgctgcggcacgacgatccataagccaagcttttcaccaaaagcgtgttgacctagctcgtgataccta

SEQ ID NO: 761 - DNA, 346 bp, Arabidopsis thaliana
  misc_feature (1)...(346): n = A,T,C or G
tcgagcggccacccgggcaggtactgagcgtagatgctatcgacatgtcagggaagcatgaagtggatcttgatacaaacatttggnnnctccgtctcaacagtcatggtcatatcataggcacagaatatatatctgatcttgtttaaaaggggcatgagcatggccactcacctcacaagcatgatggcaaagaagaacacaagaatgagactgaaaccgaagcattgaatattcttggctttgaccaagctgctgagactatgattaaaaaagtgaagcaagcattggcagatggagaaggatgtcgggtttatggtgtcctagatgtacctcggccgcgacc

SEQ ID NO: 762 - DNA, 346 bp, Arabidopsis thaliana
ttttataaaagacaaattactttgtttcaaacctatcattacagaaccacaaacaacattaaccccagaaaaccaaatccccttttatttgatgttgtcttattgcttggcttacaatccaagtaagacctataggttacaaactgagcataaagctctgcatacataaataaaaccaacggctttaaatgaaagagacacatacataaagactcttgaacaaggaaggtctagaaaaagcaagaaagttataaaattaagaagaagaaaaagaaagaaacagaaaaaggtatctcagagccagtgaagagggtttattactgatagtacatgagctgctgatggg

SEQ ID NO: 763 - DNA, 346 bp, Arabidopsis thaliana
acacaggtgacaaccacagtgaaacaaatcagtttgagtaaagtgaatgtgaagtcgaggccattgttatcaagggctgcttcagctaagtgttgatatggaagttttcctgatggcggtttggcttgcgggatgtatataacaaaactcttacttatacaaatggtctcgtgagccgtagaatgctctcttacatctattcgttggtttggcttttttcccccaaaacttgggtcttatgatattttggtttgcactttggaggtttttcctcgaattggagtttgtttattgacatgtgtagtgtccacttttgaactgaaaaaaaaaaaaaaaaaaaaaaaaa

SEQ ID NO: 764 - DNA, 346 bp, Arabidopsis thaliana
  misc_feature (1)...(346): n = A,T,C or G
tggcgagacacttattagaagatgtaatgagcatggccaccacaacaacacatttcgatgctnnnncctgtttcatgttgtgttcctggctgtgatcggttgttgtatcctctccgctctgttattctcttgtgccgacggagtctccgacaacagagccacttcaggcacctctaccggtggcggaggttgtggcggtgccggttgcggtggtggttgtggaggttgagatttcatttttcttcgtcaggaaaatataaacagaacagtccgaccattttactttcgtttatagatgtatagctatcgtatattgaagcaataatttatttagtttccatttctt

SEQ ID NO: 765 - DNA, 346 bp, Arabidopsis thaliana
aacgggagtatacaatgaagactgctattgatgtgtccaccctttatcactcactgtcgcatttcaatgctttttgctgccactgtatcaataaacctcccatctcccaaagttatgtatttgtgttttcatcaattccatttattcttccaacgcttgccatattgactgcactttgggaacttgggaggaactgatgcttgcgaatactttgggaacttgggaacagttgggatgttctaaatctcgtgtgtgagtcgaactgtgagtagtcaaggacacaagatgacctgattagaaccaaagagaggtcccagttaaccagtgcggagcgattgaataaggt

SEQ ID NO: 766 - DNA, 346 bp, Arabidopsis thaliana
cctctagagcggccgccctttttttttttttttttttttttttttttttttttaagaagataggttagctttgaaagcaaaagatccgtcaaaaatacaagtgcctcatagttaacctgtagtaatgaagagaggcatctcaaaatgcaacgaaaaagtgaaatacaccttcctacccctcgccaaaatcttgaatatctcatttaagttctttcttcgacggttcttcactccgaatcgctttccatgctccccattgccttcaatcctcttggtctcttctttgaagtcttcttctctcttacttcatatctctctttgcacagatctgataaccaagctcctg

SEQ ID NO: 767 - DNA, 346 bp, Arabidopsis thaliana
tttttttttttttgttggcctagcaaatattatatgcaagaggttataactatcatatccaccatccaccatcacaagatttaaatactactaagcccctaaccccccaaaaaataaacatgttaaagctaattctgagtgaaaggctcccaacaaaagactgtagtgcataaaaaactaagtggctaaaaacgcctaacgctgctttttaggatgcatacataacccaaaagcatagagagaaagagagaaagagagagaagtggtgttttagttgtggaggtaattgcaggatgctcctttccgacaatgtccattttcgcggaagaacttgcatactctttgt

SEQ ID NO: 768 - DNA, 345 bp, Arabidopsis thaliana
tttttttttttttttgcagagatcaatcttttattatggaggaaaactcactagagaaacatgaaaacattggaaattaaaactactcaagattccgatattgatccagttataatttgactcataacccttatagaaaccccgatcgatccctaaatattgattttagagactcagtaatactcgtaaccgcggctctccctgagttgaacggtggctgacgttgggggcacccaagactcacgcataggttcatcggcagggtaaacgacaagctcacggatgttcatcggttggataacatttgtatcggctccaaaaagaagatgaccaaacatctcttgc

SEQ ID NO: 769 - DNA, 345 bp, Arabidopsis thaliana
tcgagcggccgcccgggcaggtacggataattctgcattggtttctgagctccattatctgtggctccttctccaagttgtctctagctagctgcaatgtttctctacggagctcatctttgatattattctggactttgacctggtcaagagagagcagaaattgctgatacgcatctttgtcagagagaagcttcctgagttcatccacgcttttgtctttcaagaagacgataatgccagctgcttcacccggtgatacttgtgctgaaatctgacctgaactttgaggccgggatgagcttggcgagctaactaaagaaggcgagtacctcggccgcgacc

SEQ ID NO: 770 - DNA, 345 bp, Arabidopsis thaliana
tctatctactactccatcaagattgtctggttctgttccgggtttgattgatttctaccgtcgccggagattttgtcgtgtaatcacctccatggctgaagcgggatcggtttacgtcgatgtagctggggaatcgaagtcggagcatgttactgggaagtggttttcggtgccggagctccgactgcgtgaccaccggttcatagttcctcttgattattccaaaagttctcccaaaattaccgtctttgctcgagagatcgttgcggttgggaaagaggagcaagcaatgccgtatttattgtatttgcaaggtggtccaggatttgaaggtccaaggcctag

SEQ ID NO: 771 - DNA, 345 bp, Arabidopsis thaliana
ttttttttttttagagaaagagaaagaggagattatataacaaaagcccaaaatcaatttcacaaaggcccaaaatggtaatacagaaggaaaaaaaaacacaaagatgatcatggttcatgcatggatcataagcatttgaattggttatataaaccagaaatgaaaagagggagagagaaaaaaaagactcaagaatcagaatgaaactctgatcttattgttttgttagtaaataagatttaatcaggcgacatagtagatggagttagggagcttgaaggttctcttgggaactggacaaccagagaagctgttccattgtgcacccatccggacgcgtgg

SEQ ID NO: 772 - DNA, 345 bp, Arabidopsis thaliana
cttttttttttttttttttttttttttttttttttttttatgtgaagatcataaattattacatcttgagattaaaacaaaagatttataatttcatatgcagtaattcaaattagttttattcataaatcatatttattgtcttaggtaatacagtattagtgatcaggatcagtaagggtactctccgacccaattaccgggtgagttatagttacaactcacgaaccaccaagtattggtgcattgaaccctagcacaccctatcttcactgaatctctccacaccacttgcgtgtaatgcaagcattgttttccacctgtgcaattattgtatgcgtagct

SEQ ID NO: 773 - DNA, 345 bp, Arabidopsis thaliana
cgtgtcgaccgtactgatagacactttcaatttcagtcgccctatgaaggcggccgaggtcaaggtcagtatgaaggtgaccgtggttacggtggtggcggttacaagagcatgatgcctgaaagtggcccatctagtacccaagtattgtccctgttgattggagtccctgtcgtcggttcgctacttgccttggctggattacttctagctggttcggtgatcggcttaatggttgctttaccactatttctcctcttcagcccggttatagtcccagcggctctaactatcgggcttgcaatgacaggctttttagcctcggggatgttcggtctaaccggg

SEQ ID NO: 774 - DNA, 345 bp, Arabidopsis thaliana
aaaaaagtgtctgtggtttaagacttattttagaccaatgaaatgctgctctcgccaccaggaggtctcctcgcaccaccatagtaatcccgatattccgacttcccgtctgcaaatatattgtgtccgctcatttcccgctttttggctgagctttgcatcttctctgaataaccaggagggattttatcagatttgaagataccattgcttgtgagcccctgaaactgagacttctggttatgtatcttctttgatgacttcacaacatgttcttcactaaacaatctgttgctgctttgcccgtttgaggttttgacagatgcacgcgagctcctcggtgca

SEQ ID NO: 775 - DNA, 345 bp, Arabidopsis thaliana
  misc_feature (1)...(345): n = A,T,C or G
ttttttcttacaaaaaaagaaaagaaaattaaaggatctttagcttcttcatctttttcccaagacttgaagctaaagttttaaaagatccttaagatctcgagagaaagagagaggatccgaaaccagcttcatagcgttagatacaatatagcttatttttttcttaacctaattaattataataattctcaaagttcccagctatttttaattaagcagcagcaacagttccattgtgaaaagcataatnncgagatctagttggtgaagattgttctttcctcnncatagctgatttcaccgaatgagacagattctgtttcttctcttttgcttcatctc

SEQ ID NO: 776 - DNA, 345 bp, Arabidopsis thaliana
aacgacaattataaatttattctattttgcatagattaccaaaattagaggatacaacagatattcaaaagcagtttattcgacaacgtcaaaggcataatttgacgtcatataggcataattccacgttacgatatcgattatacattataagacaatagctctcatatatatcgaaatattcagctcaaagccatccaactaataataggcggcgaggcccaagtaaaagtcacgagacggccgacgacggatagccaagttgttgggttcccaatactcacgcatagtttctccagttgggtagacgattagctcacggaccgtcattggctggaccacgtc

SEQ ID NO: 777 - DNA, 345 bp, Arabidopsis thaliana
  misc_feature (1)...(345): n = A,T,C or G
tagaaattatgcgtacgctacaatcaatggcattacaatgaaccaacctggtattcagattttaccaaatgacaatggacagaaaaaatatacaattttgaacagatcagatgcaaaagttgttctacagacagaaaaagggtaagacttgatgcatcttgttgaggagtttgggaagatgatgatgatgatgatcggtaggagtaggtggatctgagttcttgtcttnnntttttctcctaagctggaaaaactgctgcattgtctgagcgcattctgattcaagaactccgcgccggattgtcatcttaggatggaatggatgaactggaggtggtggctttt

SEQ ID NO: 778 - DNA, 345 bp, Arabidopsis thaliana
  misc_feature (1)...(345): n = A,T,C or G
cgagctcggtacctcgagcggccgcccgggcaggtacgagaagtttggaaatgttagcatcgaatctgagtgttcgaaattggttgcgtgggccaaaaggtgtttggagannnngcgtcgctaaagccctgcctgagtcagagaaggtcattacattcatttccgaacgtaggaagaaacttgggttggagtaaatctctactttgttatgttgatctgttgttgctttgttctattttctttgaggtctatgtaatgcataataataccaatttcaatttgtgagattatatttccctttatgtaaactcgatttcaataaaagaaactttgttgtgatgttca

SEQ ID NO: 779 - DNA, 345 bp, Arabidopsis thaliana
  misc_feature (1)...(345): n = A,T,C or G
tcgagcggccgcccgggcaggcgactattccggttaacccgaaaccattcttgaacaacttgaccggcaagactgttatcgtcaagcttaaatgggnnnngaatacaaaggttttctcgcctctgttgactcctacatgaacttgcagctgggaaacaccgaagaatatattgatggacaattgacagggaaccttggagagatcttgatcaggtgcaacaatgttttgtatgtccgtggtgtgccagaagatgaagagcttgaagacgctgatcaagactaacctgtattgagtacttagaaattgcaagtctgtgtgttttaatttttgtattctgtgagcac

SEQ ID NO: 780 - DNA, 345 bp, Arabidopsis thaliana
aattcgagctcggtacctcgagcggccgcccgggcaggtatctgaaaaagattgcagagaagatgaatggtgcttcaggtgctgagctgaaggctgtatgcacggaggcggcatgtttgcacttcgtgagaggagagtacatgtgactcaggaagactttgagatggctgtggcgaaggtaatgaagaaagacacagagaagaacatgtctctgcgtaagctctggaagtaggaatttcagagtcacagattaatttcgattatttcttctctactgtctgtggttctttctgaaaccttttcggctagtgctttaagcttttctaaacaatgtttgtacactag

SEQ ID NO: 781 - DNA, 345 bp, Arabidopsis thaliana
tttttttttgtataacttcattattcatcaatactcaaaagaggcaaaagtctcacaggttcaataataggacgcaagatcaggaacaaatacaagaaaaaccgcattataacacatctacattggtcggaaaatatatgtaagaaaaaagcaaacaaaatgaataaaatcagtaagggttgttgtagtaataacccatcggcgacggtcccatcccgttaaccggcggcataccataaggcattgcggtttgggctgtattcatcttagccaaactagcttgacctctcattccttcttgctgatattgctgccataattgctgctcttgagtcaatagatatt

SEQ ID NO: 782 - DNA, 345 bp, Arabidopsis thaliana
agaagatcaaaaaaaaaaggatgtcagaagaagaagtggtggtgttgaacttctggccaagcatgttcggagcaagagtgatcatggcattagaggagaaagagatcaagttcgagtacaaggaagaagatgtgtttggtcagaagaccgatctattgctccaaagcaacccggttaacaagaaaattccggttctcatccacaacggtaaaccggtatgcgagtccaatatcatagtcgaatacatcgatgaggtctggaaagacgataagactctccgtctactaccttctgatccttatcagaagtcacagtgtagattttgggctgatttgattgacaaaa

SEQ ID NO: 783 - DNA, 345 bp, Arabidopsis thaliana
agaatgagcagtcgttcgagtagaaccgtgtacgtcggaaaccttcctggcgatatccgtgagagagaggtcgaagatttgttcagtaagtatggacctgttgttcaaattgatttgaaggttcctccaaggcctcctggttatgcattcgttgagtttgatgatgctcgggatgctgaagatgctattcatggtcgtgatggctatgactttgatgggcatcgtttgagggtggaattggcgcatggtgggaggcgttcatcagatgatactcggggtagtttcaatggtggtggccgtggtggtggtcgcggccgtggtgatggtggtagtcgtgggccatct

SEQ ID NO: 784 - DNA, 345 bp, Arabidopsis thaliana
tactgataagtttcctttgccgtcgcctctttcgtgtcctggaggatgtcaggaggctttctactgcagtgaatcatgcgcagcggcagattgggagagttctcattccttactttgtactggtgagaggtctgaatcaatatctagagaggcgcttggagagtttattaaacatgctaatgataccaatgatatttttctcctggctgcgaaggcaatcgcctttaccattctaaggtacaggaaactgaaagcagaacatgtggacaaaaaagcgaaacagagtgagccaaagcagtcgcttctcttggaagcatggaaaccagtatcgattggatacaaaag

SEQ ID NO: 785 - DNA, 345 bp, Arabidopsis thaliana
  misc_feature (1)...(345): n = A,T,C or G
ggaccgggcgggttaagctttgttagtgaaatggtgcaggtcgaaacagtagctcagtttggnnttatctttctcctttttgctttaggattagaattttctgcagcgaagcttcgtgtggttcgtgcagtagctattccaggaggtcttcttcagatatttttgttcatgtgcttgagtggaataacagcctcgttatgtggcggtaaactaacagaaggaatattcgtaggcgcatttctatcgatgtcatcaacagcagtggttttgaaatttttaatggaaagaaatagcataagtgctctacatggccagataactgtaggaactcttattcttcaggat

SEQ ID NO: 786 - DNA, 344 bp, Arabidopsis thaliana
tgtacaagatataaaaatctatgaaagaaaaaatgacataatacttggccattaatacatttaacaccaaaaccaaatcctttatctcatcatttgcacaaaacacacagaatttgaagacgaaactattgtcagctcaagtgaaggtattgctattagcacgcaacaagtgatactagtatttaggggctgaagactgaagacaatctttcataatctcctgaatccttctctgcaacaccttgtccttaactctaccaatcatgtcttcatagaaagcttgaagcctcatcagctgactcttatcagcactctccagcatctctccccactcttttcccata

SEQ ID NO: 787 - DNA, 344 bp, Arabidopsis thaliana
  misc_feature (1)...(344): n = A,T,C or G
tttttgaagaaaccatcacattatagctattgatcaaaaagcttaaaattcaaacaaaccaaaacttacaaagangaaaaaaaaaagtttcaagaagaaaccaaagaaacaagtaaaaaactttggaaagcaagctccttcaaggatgattcaattatacaagactaccctatagaagctaaccaccaccatgtattcaatctccccccaaaacctatcctaaaccaatcttcttcacttcttagccttcctagtcgaagctctcttcgccggnnncttcaccttcacactcttagccggagccttcttagtcacagccactttcttagcaggagcagcaactt

SEQ ID NO: 788 - DNA, 344 bp, Arabidopsis thaliana
ttttttttttttttttttttttttttttacatgagataagcctgcaataagctatttgccgtcaatgttatacaaactctcagggctcaacatatagatgcaaagaacaaagtagtgtgcatagatcagctttcttctatgagacaatatgggtacaattagccatttgccatccatactatacaaagctctcgcatgactttccacctcaacatcaaaaactccattatcaagtcaaacatggtactactttaagggagagtattatgaagcaaagcagccatcgagtaaaacacgtgctgatgttttctaagctttttagagtttgaactctggagagtgat

SEQ ID NO: 789 - DNA, 344 bp, Arabidopsis thaliana
  misc_feature (1)...(344): n = A,T,C or G
tcttccaaagcactgatcgaatccataggctctcttgacaaagactcatacgtttctctcttatcaaaactcataggcgaatctaaattcgtccaaaacaatccgccggagctcatccctcaagaggacctaatcgtcaaacacgtccttgactctctccgtccttatagcacagaaactggtggtggncctctggtgatcaatcatgtcgcgtatcattcaggtcgaggtaatctcatcgttgagtacccaggatctnnncccggaaagatcttgtctttcgtcggaatgcatatggacgtcgtcactgcgaatcctgatgattgggaatttgatcctttctc

SEQ ID NO: 790 - DNA, 344 bp, Arabidopsis thaliana
atgaaacataaagattacacacattcattaaatatcagaatctagatagctttttggggtggtttgttacatgggaaaaagatacaggaagtgttcatagcaggccggtgatgtcgatgtatgacgataaagaggttgtgatacgttccaacacatcccacatcttattcacgcctttccaggacaccagaggggagcgtttcaatttgacactacgaatgaagttgccggttgcatatttggtacatgcgccaggtactttattacctttgtaagccttgcagatgtagcttatgaagttttcatagtcctcataaagtggctgaccatccacgactacccag

SEQ ID NO: 791 - DNA, 344 bp, Arabidopsis thaliana
cctcgagcggccgcccgggcaggtatggcgtcttcggtttttctatccagtttctcgtcatcgtcttctttgcaactctgctcttcctttcacggcgagtacttagctccgtcgagatgctttatcggagctccggtcacttcctcttctttatcactctccggtaagaagaactcatattctccgagacagttccatgtttctgccaagaaagtttctgggttagaggaagccattagaatcagaaaaatgagagagcttgaaactaaatcaaaagttaggagaaatccaccattaagacgtggaagagtatcgcctcgtcttcttgtacctcggccgcgacc

SEQ ID NO: 792 - DNA, 344 bp, Arabidopsis thaliana
tttttgaacgaaaacaaagaccattattcataatcattattacatcaaaaggaatagaacaacagcataagaggtagtcttattattacaatgcacaaactcagaatttcaaaccagagttttgaagtttctcttgaatgatcatgtcgattttgttctccatttcaggagtcaaatagttcttccaatcaccaacttctcctttacggaaaaacattttgttttctctaccagaattcaattttccggtcttattgatctccaaactgctcagattacgtagagaacaaagatcgataatctcatccaccgatccgctctcttcttcttccttagtaaaagga

SEQ ID NO: 793 - DNA, 344 bp, Arabidopsis thaliana
gaaaaagcatacagaataaaagagtcttaaagaagaactttcatacaagcaaaagacaaatacaaatatgaatgaagtttctttatctaaaagcatacacaaggcacagtgtcataactcaaaaccagctcgaatttggttttactgaagcttcttgatcccagggaaggatggaaggatggagatgagagcatcattgtatcctacaggctctccatcttctcggagtatcttgactacctcgccggtaacatcagactcgattggaaattggccaccgagttgttcaatgtagcacagaatttgaccttctttcacttggtctttctctttacaagacgaag

SEQ ID NO: 794 - DNA, 344 bp, Arabidopsis thaliana
  misc_feature (1)...(344): n = A,T,C or G
gcggccgcctggataggaaattatttgtttaaaacccaaaatgatgattcttgaaaacaaaaatacagatacaacacaagtgaagaaaaagatgcaaaagaagtagagcaagaccaagaacaatgaagattannnaatttacttgggaaaaatttggctcaggaattttggaaactgtttttgacttctcgtcttcgcttggcgtcttataaggtcaaactatctggattctcaatgatctttgcaaaggtttggagaaaagcagccaagtcagctccatacacaatgcgatgatctgcagtcacattcaccagcattgtgttttttacactgaagaatccatc

SEQ ID NO: 795 - DNA, 344 bp, Arabidopsis thaliana
aaaaaaaaatctctttttggtaatgttaaggagaggccacgttcttgttggctaattttctgccttgacaagatcagagaagagatcaattatgaattgtgttattattattttgataaaaactaaataccacagcctcctctcagtgaaaaagatcctgcaagtcgatgatgtctgcaagaacaccggctgcagttgtgtcgttcccggctccggcaccttgaatcaccaaaggctgctccttgtagcaacggctatatatctctactatattgtcactgcctcttagccgtcccaatggtgaatcttttgaaacttctcgaatgccaacttgaacgcttgaa

SEQ ID NO: 796 - DNA, 344 bp, Arabidopsis thaliana
cctaatctcgccgtactctcctcggttccatctttctctgcggccagtacgtgtgcagatatggctaccgagggagttgttccttcagcgcaggatattgctgctgaatttgtgagacagtactatcatgttttaggacagcttcctcatgaagctcgtaggttatatgttgatgctagtgttgtcagcagacctgatgttactggtactatgatgtcttttacttccgttgaggctatcaacaagcatatcctgtcctgtgactttgagaatactaaatttgaggttctgagtgttgactctcagaattctttggaagatgggatttttattatggtgatcgg

SEQ ID NO: 797 - DNA, 343 bp, Arabidopsis thaliana
aattgattcgaatataacaaccttcaaaacactcgttttgagtttattcaacaccaacattaaagttattattaaaactaaaaatacgatagaacaaccttattatacacacatgacatgatgtgaaatatatgttgagaaggtccattggtgcatatggagatttatgtttttctatgccataacaattattactgtttgggacgaattgcaacacctttgagggagagccctttcttccaaacaccagccgcatgctcatacattgagaaagtgatctctccggcagcggatttctcaggtacgaactcgccaactctgacatcgacccatttataccttg

SEQ ID NO: 798 - DNA, 343 bp, Arabidopsis thaliana
cggccgcccgggcaggttagtactaaagatatgtcaactgtccaaaacgcaactccttttaacggcgttgccccatccaccaccgtgcgagttacaatcgtccaatcctccaccgtctataacgatactcctgccactatagacaaagcggagaagtatattgtggaggcggcaagcaagggagcagagctagtgttgttcccggaggggtttatcggtagctatcctcgaggttttaggttcggtttagcggttggcgttcataacgaagaagggcgtgatgagtttcggaagtaccatgcttctgctattcatgttcctggccctgaagtagcaagattgg

SEQ ID NO: 799 - DNA, 343 bp, Arabidopsis thaliana
  misc_feature (1)...(343): n = A,T,C or G
ttttttttttttacgaattatctttgaaattaacagtacaatcacaacaagtgaagaaaacaaagagaaanaagactatcaagagtcttctcaatacatgaccgacagaccgagacacacaatcaagagaggctcaaaacaacggtattgcgtcaaataccaannaacttataacaaacttcaaacgcaaacgcttctaatcgccaacatgcaacgagatgattgctatgttcaatcaagtatatacccgtactagctttcagctatggttttgatcttcttcttcttcagctttgcgtttgcaccaacaaaagtattccgaaatagccccgtcttctcctgt

SEQ ID NO: 800 - DNA, 343 bp, Arabidopsis thaliana
gcggccgctagaaccagtcccattccaattgctaattgcagaggttctcagatccgtaggtgttctagtgagtttgttgacaaaaggagaagcctttcttattctgagctatgggcaggacctacttactctaactcacctccacctgcttctgtgccgattcctaagttttctctccagcaaaagaggacggtatctttgacctttcctgctcctgactctgctgttgatattcgtgaagttgctaagtctgcaccagtttctccaacctcatctggtgacaatccttttcgtagtactgtctctgccactatgacactgcgtcgcatgctcaatcttgagc

SEQ ID NO: 801 - DNA, 343 bp, Arabidopsis thaliana
gcggccgcgatatgattagctcaccaagcaaattttttaaaaaaagatgattacaaactctacaaagacattattcttgtctacagactaatcagcaattactctccctaacttcaatcagccaagctttatgaacaatcaaatcatcaatcaacatgaaacgaaaaaacaagaatcgtcgttcggaaaatatatgattcttcttacatacaggttaaaaacgtatcctgcgcagtctcttatggccttgtaaagacgccccaaatcttactccgggaaagattctccgccagtttcttagctccttcggtatccatatccacaagcttttgcaaatgcaagc

SEQ ID NO: 802 - DNA, 343 bp, Arabidopsis thaliana
ttcattggcattctgatccacaacctcagtttatcattgatgaatcgagaaataaattcgaggatttcactttctcacccgaagaaggccggaacgtcctggtaaaaggggtcacggacgatggtgtccatgacgtcgaagaggagaatcggaagcttccttttccgagagatttcatcaccactgctgctgcccagacagcaagaacccgaggcccgaacaggattcttcttccacatgttgggtttcagattgatgaattccgccgatgtgtgcatcgccgccgccgccatcagaaactacctagtttctagttccgatacctgcccgggcggccgctcga

SEQ ID NO: 803 - DNA, 343 bp, Arabidopsis thaliana
ttttttttttttttttagtaaacaatatttattgaaatgacaacaagccaacaagtgaaaatgcagaggaaaaaagtaacaatttaaagcggatgatacatatagattacataattggaaatgtaaggaaaggattgctaatttagggttgatggtgactagaaaaggaaggtgaaagaggagggattcccgggatgagagggaccggagggattccagggataagagggaccggagggatgccagggagtccagggaccggagggagcggaacagggaaagaaggtggtggtggcggtagtgaaggcggattcacgatagggacaggtggaagaaccggaag

SEQ ID NO: 804 - DNA, 343 bp, Arabidopsis thaliana
ccgacaaacacaacttctacaagactcaaatagtttctatttaattactaaaaagaaaaatgggtcgtggttacaatttgctattcgttctagtaacgtttttagtattggttgcagctgtaaccgcacaagggaaccgtggctcaaacagcggtggtggtcgaagaccacatgttgggttttatgggaatagatgccgaaacgtagagtctattgtgagatctgtagttcagtctcatgtccggtctatcccggctaatgcacctggaattttgcgaatgcatttccacgattgctttgtccatggctgcgatggctcggttctcctcgctggtaacacctc

SEQ ID NO: 805 - DNA, 343 bp, Arabidopsis thaliana
  misc_feature (1)...(343): n = A,T,C or G
attttgatccggtttatctcggttcaatcacatcgaccccaaaagaaacaaaaatttacactttgttttccactcatacttatacaaccaaatatttgaaggatttgggaatgaaaccaaagctgtacgtacaacaactcaagctggtgcaattgagactctatcaatctcaactatatattccaacgaagcattaggaggaatctgcaaacccgattccaattcagcaccgtctacaccaaatcctaacgatggtggancnatcactctgcgtttnnctccagccttcatggaccttagtacataatctatgccttcacataatcctttgctatatggtttt

SEQ ID NO: 806 - DNA, 343 bp, Arabidopsis thaliana
cgagcggccgcccgggcaggttaaaaaatggcaaacctcttggtctctactttcatattttccgcacttttgctcatctccaccgcaacagccaccacattcgaaatcctaaaccaatgtagttacaccgtgtgggctgccgcaagccctggaggtggccgacgtctagatgctggccaatcatggaggctagatgtcgcggcgggcactaaaatggcacggatttggggtaggaccaattgtaactttgactcctcaggtcgtggccgatgccaaactggtgactgcagtggtggactccaatgtactggttggggacagccaccaaacacgttggctgagc

SEQ ID NO: 807 - DNA, 343 bp, Arabidopsis thaliana
  misc_feature (1)...(343): n = A,T,C or G
ttttttttagtataaacatattttcatttcattttgttcttgtttaactaagctcacagcaacagaattccgaatattagctagcaattggagaaagaataaaagacagaaacagagcaccaaattattcttttagcccaaaattttccaaaagtacaacaacaaatccggcaaaaacacatacagaaaccaatttttgatttaccgacgaaaatttcaaatcagaaaaccggatttgatccaagtgggtccctaaaccgacggtttannacaattttttcaacgatgagcttttttcaagtcaaactagcgaaacagctatcagacctagacaaaacattag

SEQ ID NO: 808 - DNA, 343 bp, Arabidopsis thaliana
cggccgccctttttttttttttttagttaatgtgatctttatttttacttaatagttgatacaagacaaacataaacacacataatcagaatagtcgcctacgacaaccttccactggaaccaagtcaaccaaccaatcaaaattctcagaaagactttgctttgtttttcaaaagcaactctctgagctcagctggatcaatctcagccgcacgattggaaggtctgtagtatccagtaactggatctggtccccaagcagactctgcctcttgatctaaacctctctgttccatcttccccaccataactctggtggaacctcccttactcaatcctgctg

SEQ ID NO: 809 - DNA, 343 bp, Arabidopsis thaliana
  misc_feature (1)...(343): n = A,T,C or G
tatatactcttctgcggatagactacgcctttaagctgttaagaaatctcgtatatagagaagggactgtgacacctggcaatgatgaaacagcacatgttatagaggagcttgaaaacgaaaatgttgtggaagattttgcaaatataacttcgcctgctgggaagtcgtttcttatgaggctcttcagattgtccaagtccatcatctactagtcttccatcaggatcctgccaannatctgaagtttcagagcggtgtagttcagagagggagagagtgtgggatctacacattctgtgagtaacaaaaagacagtcttcaccgattatagttataagtt

SEQ ID NO: 810 - DNA, 343 bp, Arabidopsis thaliana
tttttttttttttttttttttttaattcaaaatctttattgattagtccattttataacattaacaaataactagccataatcttgctgacaaagtactttgttggtttgtcaacccaaattaacagagtaatttcttagctcggcgagtgcggctacaattggtagagaaggttgaatgaaattgccgaggcagaaagcatgatttagccgtcgctactcgctgaggcagaaccgagcttacaaacagtttttggaaactggacgctaatcttgcttttgcttgtgaataacgtctactgaacaagcctcgtctatgtatcaaatttcacttcaatcgttgg

SEQ ID NO: 811 - DNA, 343 bp, Arabidopsis thaliana
  misc_feature (1)...(343): n = A,T,C or G
ttcagatcttgattttaaaaaccggtccaaccacaaaatatcatgtatatacaaattacataaaacattattcgtgagaaactttaaaacttagccgagtgttaattataaaagatgggatgttaagtccggttaatttttgacgtatttatatatgtgtcgtattaaatacgttaaaaactaaccgtttttaaacataaccaaagcgatttaataaaataaaaataaatgttannnntttaaattatgtgtaaactatattgaacataacacatctcttaaggattttggatatttttttaaatccggttagatttaacaacgtcatattaattaatattta

SEQ ID NO: 812 - DNA, 343 bp, Arabidopsis thaliana
  misc_feature (1)...(343): n = A,T,C or G
cttttttttttttttttattgaaagggtatacatttttccattgcaccacacatatcatatgtgacttaaaacaacaaaaattgcgtaatagttgtaggaatttaattattagctagatatatatatagttcgtaaannntgattagatcagactactacatgttggagttggacgatgggccagttgatgaacaactcttcataaaggcctcaacggtttcgtacagggccttagctttgttcccatcaaacaactcacaagcatgaaacccatctttatcaaacctcgtctccacgtgaactccacgtccctttaacatctccgccacgtgtctctgacga

SEQ ID NO: 813 - DNA, 343 bp, Arabidopsis thaliana
tatggaatcgccgattactcaaccccaaatgtttagattgcagtttcttcgtcttcttcatagtcgacgatcaccccaagttccattaatagccgattcttcaaatcctatcgagaatcctctctttcaagctgatgttccttctaccacagcaatagagtcttgtccaaaagaaaacattggtaagttaaaagatatgcttaaagaagaaaacattcatttgcacactgaggattcagagcaagggaaattacctttgcttattttaagcttgaaagagagaagtgaagaaaaaaggccagcgattgtgtttatgcatggcacaaacacaaacaaagaatgg

SEQ ID NO: 814 - DNA, 342 bp, Arabidopsis thaliana
tcactgccttgaataatgaatcaaatgaactgtttctttctttctttcttctccatgagaagaattatcatatcatagatctattccaacaaatgggaaacaatttaaaactactcaaataatcaaaagaaaattataaccagaaaaaaagagaagcttattgtcgccaccatcattcatcttcttcaacataattcaactcttgtttttttcaaaagtcatagtccttgaacaacttcttaacttgttcaagcgtaacaaacaaaaccaccgtgaacggtgcttgtctcgaaaccgtcgggataaaacctttatacaaagacataatcccttccgctttca

SEQ ID NO: 815 - DNA, 342 bp, Arabidopsis thaliana
tcgagcggccgcccgggcaggtgtctgactaaaccagacgaagaaccaatttcaacctcctcgccggaaaaaatggcggaaggaaaagaagctacgacgagttcgctgagtcaaggactcactcctcaccaagaccccgacgatgctcccaagtctcctcccaactctccaaattcttctactcgcaaggttaagctgggtaggagaatgatatagcagaatcgataagatgatgatcttgtgaagactgcgaaactatgagtggcgatgtgaaattttgcttgttatggggttctacagagttgggtgtctaagaagtttatgactggatttgtcgtacct

SEQ ID NO: 816 - DNA, 342 bp, Arabidopsis thaliana
tcttttcattgacatagacctaagtcatatattaaaatgatactgatacttcagtagattatacttcggtaatggtacacatagcttaattgcgggggactgaaaatccttgtgtcaccattagtaaaagcaagatgatccttcggtaatggtcgacatagcttagttgcagaggactgaaaatccttatgtcaccattagtagaggactgaaaatccttatgtcaccattagtaaaagcaagatgatacttcagtagatgatacctcagtaatggtcggcatagcttaattgcgggggacttaaaatccctgtgtcacatgataatgatccttcagtaaag

SEQ ID NO: 817 - DNA, 342 bp, Arabidopsis thaliana
tcgagcggccgcccgggcaggtctcaaaacccatatctctctgtcttgatctctctctcactttctaataagatcaaagaagatgtcgaaagctaccatagaactcgatttcctcggacttgagaagaaacaaaccaacaacgctcctaagcctaagttccagaaatttctcgatcgccgtcgtagtttccgagatattcaaggtgcgatttcgaaaatcgatccggagattatcaaatcgctgttagcttccactggaaacaattccgattcatcggctaaatctcgttcggttccgtctactccgagggaagatcagcctcagatcccgatttctccggt

SEQ ID NO: 818 - DNA, 342 bp, Arabidopsis thaliana
cgtcacactttgttgcgtgtcgtcttctctctctcataattcttgagtttcacgtctcaagatttgatcacttctgccaattttccagattgatctctctaattatggcttccatgagtttcgccttgaatcgcttctctggactctcctctaaaaccaccttatcagctgacttcgatccatcctctcgccggagttttctaccgccgactagagttggacttaagatctcttccgccgccgaatcggagcctgatctcagtgtcactgtaaatggcctgaaaatgcccaatcctttcgtgatcgggtcgggtccaccgggtaccaactacaccgtcatga

SEQ ID NO: 819 - DNA, 342 bp, Arabidopsis thaliana
agtgggagattcccatcagagccttaccagagtcaatcacgggaaggtcaacatgcctctagaggaggggggtattctggtaatcatcagaatcaacatcaacaacaacaatggcatggtcaaggtgggtccgagcaaaataacccacgagggtataatggtcagcatcatcatcaacaaggtggtgaccatgaccgcagaggaagaggaagaggaagtcatcatcatgatcaaggcgggaatcctagacatcgatattgagcaggatggtacctgcccgggcggccgctcgaatggcttccctttcccactccaatgcaacaaactcactggagtgggaaa

SEQ ID NO: 820 - DNA, 342 bp, Arabidopsis thaliana
caaaagagtattacaaacaacttattgaatcacatgtatatcacccatttatttatctgtatagtacattacaatgtcgaaacacagctcacagccaacaaatgccaaaaaaggaagaaaaaaaatcattcgaagtgccatagatcacattaaaatgatcaaattaagagggaattcggagatagagagggattggatttttggtaagtggaggtgaatcccatactgaaaatgcactttcagagttcatccatttgtctgtcatatcaggataatgacgatcaatcacatccttgagactctctgtagtattcacccattcaagccccttcttcgtgtaaa

SEQ ID NO: 821 - DNA, 342 bp, Arabidopsis thaliana
aggtacgaccgatgagttctgcggcgagggctgccaggcaggaccttgccggagcagtggaggcggtggagatcctgctgtttcactagaaggaacggtgacacctgacttctttaactctatactaaaccaaagaggtgattgtcctggcaaaggattctacactcacgacaccttcatggccgcagctaattcttaccctagcttcggtgcttccatctccaaacgcgaaatcgcggcgtttttcgctcacgtagcccaagaaacagggttcatgtgctacattgaggaaattgatggaccagccaaggccgcatccggagagtacctgcccgggcggcc

SEQ ID NO: 822 - DNA, 342 bp, Arabidopsis thaliana
ctctagagcggccgccctttttttttttttttttttgatataatgataagacaataaaatattcaattattaggaaaatacaatacaacgttcaataataatggatacaaaatgttttgaaatagtaggcattttaatttgtatacccctccacagattatcttttatttttcagcctttcttttggctgatcttaagttggtttcctcatggggcatagcctccaccgccgtgaccaccaccaccaccgtgacctccgcctcctcctcctgctgcacctcctccatagccacctccttcaccaccaccacttccatagccacctccatgtgctcctcctcc

SEQ ID NO: 823 - DNA, 342 bp, Arabidopsis thaliana
tttttttacattgtaatttgacaatttgtataaccagaacccaaaaatccttggatataaactacatacctatacaagcttcttttctctttacctccaagactttcaaaaagagatataagtcttgagatggggaaaacaaagtacaactttacatcaactaaaggtaataaagacatgactcaacactggtaaactgagaagctcttacttttccatagaaagctgaatgctcttcccattttctttctcgaggctgatttacactgcggttttgtctctgttacagcggctgaagcaacagagaatccgtcctcggggcttgtgacttctgtatgctgc

SEQ ID NO: 824 - DNA, 342 bp, Arabidopsis thaliana
ctcaaatttccccaatttccctcactagaaacaaaaaaaaaactagcgagtggaagacaactgacaattctatctcatgtatcaaaacgacaaagcaataaacgtcaaacgatatcaacacgacttggctgtctcagctcatttcttagcttctgagagaagagcctacaagcatccatgcttagatccaccgccgctgctagtgccacgtgcgccgccgcatcctccgtacaagtcacgtgcttcacacctacctccaccttaggcttgctctgtttctccactccttgcaccctcgtcgacatcacaaaccccaagttttgttgcgcttgagacagtgag

SEQ ID NO: 825 - DNA, 342 bp, Arabidopsis thaliana
  misc_feature (1)...(342): n = A,T,C or G
agttttgttttgatattttgtaatggatttttcaaaaaattttttattaatatagcttttttttttgnnnttttacttattttgtgtttatttttatgaaccaatgaaatacctatggttctatatataataagttgtccatcgttttgtacagacaaacgcacaggttcaataatcaatattccttttttcattaattttgcaaaagtgaaatttttctcaatcattagaatgtctaggctcatctctcctctttcaatagaagataccgctatttcgtttggattgtttagtctaaccaagagacagtatacttttacattattgagaattttttgatta

SEQ ID NO: 826 - DNA, 342 bp, Arabidopsis thaliana
ttcccccattttctgcgattcacgatatttcttcttctataggacaacgtttttttacacattgaggctaaaagagagatggctgatgatcagagttcaagtactgaccgtctcgtgaaacctgaaagtttaaactcagatagaggatccaatcaatctattgaatcttctggagagagttctagagctcagggttccacaagcctgtctactactaaatctatggatggtaagaaaaccgaggaagaagagacaacggaacaacgcgatgttgatgatgaagaggaaccgctcatccaatcggttgaatgtcgtatatgccaagaggaggattccgttaag

SEQ ID NO: 827 - DNA, 342 bp, Arabidopsis thaliana
tcttggagatggcttgggtccagttgtgcagacaaagaatggagggttcttgcgatcaatgaatcccttactgttcaggaactctaaagctggaggcagcttgatcatgcaagtgtcaactccagtggtggtgcctgctgagatgggctctggtatcatggagatacttcaaaaactagccactgctggaattgagaagctctcgatgcaggcaaataaagtaatgcctttggacgatataacagggaaaaccatggaagaggtgttgtgggaaacttcacctacaattgacattggggacagggatcatgtatcagagcgtgaatctggtgatgcatctgg

SEQ ID NO: 828 - DNA, 341 bp, Arabidopsis thaliana
cggccgcccgggcaggtggagaattaagatttttaactttaaacgagagtttcgtttatttactcaaaaatttacttctgaaatctctatttgaatttcggggaaaaaaatcctaagtaagggaatgcagagagatggtcggagtatcgccggtgaagactaagctgtgtgatcggtttaaccgatccgtcggcggcaggaattgccaccggaaacacgtcgaggacgggtgatccagttttctaaactctcgtctctcgaattcttcgaagatatcgaaaaactgtaaatcttttttttcttctacttttttacaaaattctctaatcatcgttgtaaag

SEQ ID NO: 829 - DNA, 341 bp, Arabidopsis thaliana
caagaagataggtttggtacctcggccgcgaccggcgcgctcgagcggccgcccgggcaggtcgaggagccagttggattatccatgtcagagagagagattggtgataatcagcgttgcacttgttgtgaagctaaaggtgcattgctttgttccacttgttctggaactggtctatatgtagattccattatggagagtcaaggcatcattgttaaagtccgttgcttaggttgtggtggaagtggtaatattatgtgcaaactttgtggtgggcgtggtcacgtaggacactgatgactccgtgtttcacttgtttccactcatggttctgttttacc

SEQ ID NO: 830 - DNA, 341 bp, Arabidopsis thaliana
gggcattgccatcacttctgataagattgcgactttggtcaaagcggctggtgttgagattgagtcttactggccaatgttattcgccaagatggctgagaagagaaatgtcacagaccttatcatgaatgttggtgctggtggtggtggaggcggtgccccagtgtctgctgccgcacctgctgctgctggaggagctgctgctgctgcccctgctaaggaggagaagaaggacgaacccgcagaagagagtgatggagatcttggtttcggcttgttcgattagttgtctcctttcattttaagtttcatatgttctattgctttagttgctttgagat

SEQ ID NO: 831 - DNA, 341 bp, Arabidopsis thaliana
gtttgttttacgaagaatcaactatggcgacgaagagaagcgttggaactttgaaggaagcggatctgaagggaaagagtgtgttcgtgagggttgatctcaacgttcctttggatgataactctaacatcaccgatgacaccaggattcgtgccgctgttcccaccatcaagtacttgatgggtaatggatctagggttgttctctgcagtcacttgggccgcccaaaaggtgttactcctaagtacagcttaaagcctcttgtgcccagattgtctgaacttcttggtgttgaggttgtaatggcaaatgactctattggtgaggaagtccagaagttg

SEQ ID NO: 832 - DNA, 341 bp, Arabidopsis thaliana
cttgtatggtgagaaggaatggtacttcttctctcccagggacagaaaatatcccaacggttcgcgtcctaaccggtccgctggttctggttactggaaagctaccggagctgataaaccgatcggactacctaaaccggtcggaattaagaaagctcttgttttctacgccggcaaagctccaaagggagagaaaaccaattggatcatgcacgagtaccgtctcgccgacgttgaccggtccgttcgcaagaagaagaatagtctcaggctggatgattgggttctctgccggatttacaacaaaaaaggagctaccgagaggcggggaccaccgcctc

SEQ ID NO: 833 - DNA, 341 bp, Arabidopsis thaliana
tcgagcggccgcccgggcaggtacgagaaggtgtatagtaatgtcatgggcaagccaactagagcgaggactattgttgctctttggagatagatcccaagcatctcgtaacgatgggctccataggcttgtccacatagtgtttcgactgcactgcccatacctaacataagtccatagacgagattgaagcagctatttccgatggacgcggccgcaagttcttgactaccaacatgaccggcgaagacacgagcggatatacccattccggagttgactaaatagataagtatcgccggtagtgccaaccggaaaagtacctcggccgcgaccacgct

SEQ ID NO: 834 - DNA, 341 bp, Arabidopsis thaliana
  misc_feature (1)...(341): n = A,T,C or G
aatcagaaccagatagctttaggtgaaatatgaatcatcccaatgattttatatttattcaacaaagaaagagagacgttggaatgcaaaacaacatggaaatttccaattcttgcttttggtctgaagagaattcaaaaagaagaaagctcattcctctactggcctttgacccaacacagagatgtcttcatatcgtttcccaacattgttgcgttcccagagcttatgaacaccgtaatccacagcccgttcaccgaaaaatgcgccggnnntgatgaaagtaacgtagacggaattacggcgcatgataagtttgtaaaagccttcgaaagcgcctt

SEQ ID NO: 835 - DNA, 341 bp, Arabidopsis thaliana
tcgagcggccgcccgggcaggtactattcttactgttacgatacacttaggtatcctgagcctctaccggaatgtgtgattgttccggctgagaaagataggtttaaggaaacgggaaggttgaagtttggtggtacggaggcgcgtgaacggcggagaaatcgccggcagcaacgtcggcctgagattgagattgagattgagagtgatcctgacgacagaaaacttttataagatttgtttgtgccattctttttacttaaaattcgtttgtgagtataataaaataaagagtaaagatttgaaaaagaaaaaaaaaaaaaaaaaaaaaaaaaaaaaat

SEQ ID NO: 836 - DNA, 341 bp, Arabidopsis thaliana
aaccgggggagaagtcggagcagcgagttctctagctcccaaaatcggtccgctaggtctccaccaaagaagatcggagaagatatcgcgaaagaaaccgcaaaggaatggaaaggattacgtgtaaccgtcaagctcacagtgcagaatcgtcaggcgaaagtgacggtggttccatcagcagcagcactcgtcatcaaggcgttgaaagagccggagagagataggaagaaggtgaagaacattaagcataacgggaacatctcgtttgatgatgtgactgagattgctaggatcatgagacctagatctattgctaaggaattgagtggaacagtgag

SEQ ID NO: 837 - DNA, 341 bp, Arabidopsis thaliana
ctttttttttttttttatgctgcaggaaaataaaatgattaaccctgctttggtcaataaattagaaccattttgacacaagtcactaagacctgaatacagatgtaacaatatacaaataagttacaaccaaaatgacaacttcaattgcaaatctaataagttaaactgaagactgattcttagaaagttgcaaaagtagattaaattttcatttgggcatttcatcgaacatctggaagacacttcagaacaaaagactaagaaaactcaaaaccaaatctaaaacatgaatctacaaatcttatgagagcaaacaagcaaatctaccggacgcgtgg

SEQ ID NO: 838 - DNA, 341 bp, Arabidopsis thaliana
  misc_feature (1)...(341): n = A,T,C or G
ttttttttgtaagtatgttcctctatatcatatatctaacaaagtagtgttgtattttacgcatcctcacttcacgacaagggatgcgcnnnaccttaatacaaaagtcattgcttctttttccagtgatttctgtttacagagagagagctctactggtttttcccaaagactgggatctagagagcttagagaaaagaagagaacacccgataggtcgtacagaaaacacggaagagacttacgagtgtaatgccatgaagtggttctgcttacgggcatgttctgggacaagtcggtccacagtttcaggagggataccagagagttcttgtggttta

SEQ ID NO: 839 - DNA, 341 bp, Arabidopsis thaliana
aaaaggaaaggaaacagaatgtttgtttgtcctgactacacagtattacaatgcaaaagcacttttgttttgtagtttgatatcgctctctctctctctctctccctctactttcgtttattgccttctcctcctctgcaagtgtccttgtcttcttggagagctttagaagacgtccggattgaatcttgctggcattgagttgccatgttccacttgctgcagctgcattctcaacgcgtaattgttcacctccagatttctaagcttttcctgatactgaggaaccagttgcttcaacagtcctagctgatggttcgcatcctccaatgccttctgcc

SEQ ID NO: 840 - DNA, 341 bp, Arabidopsis thaliana
tttttttttttttatcaagaacaacaaacccattttatttcaattataatatcaaatgaaaaataaattttttcacaccaactacttccttaagcattacaacatttcttattattttggttaacttacataaatagagcatatgatttagactatcaataaccatagaaaaactcatggacctttatgatctgagtgactcgatcaaatatcttcagcgggtcaggtaaagatttcgagatagcgggtcgggttaagcatttacggatccagtccattagcttgggagtgtggtcctcgacactaaaaccaccaatagtctcccatgtgtggaaccaagg

SEQ ID NO: 841 - DNA, 341 bp, Arabidopsis thaliana
caacataagtcccactcccacatcattattattcactcttatcatatttttctcttaatcagacactttttctttcttctcttcctctccagtggtcttggcgtgataacctggaagcttctctttgatcttgtccataaatcccttcttctcctccgggatgtcagcaatcggtgttgctgtttcaaccagcggtgtggtgttgacgacttgtgaatcctctggtttcttgctgtggcctggaagcttctccttgatcttatccataaaccctttcttctcttcttcctctggtttgtgatcctctaccgaatgtggtgctggcatggtggtgacgactg

SEQ ID NO: 842 - DNA, 341 bp, Arabidopsis thaliana
ttcaaagcctctcttctcccattctcttctaatttccgacaaagctccgccaaaatccatcgtcctatcggagccaccatgaccacagtttcgactcagaacgagtctactcaaaaacccgtccaggtggcgaagagattagagaagttcaagactactattttcactcaaatgagcatattggcagttaaacatggagcgatcaatttaggccaaggctttcccaatttcgacggtcctgattttgttaaagaagctgcgatccaagctattaaagatggtaaaaaccagtatgctcgtggatacggcattcctcagctcaactctgctatagctgcgcg

SEQ ID NO: 843 - DNA, 341 bp, Arabidopsis thaliana
gaaaacgatgactttggagcatgaaattctgaaggagaatcatgagactctgttgaaagattatgagagtcttcaggagaggattaagcatgctgaggaagcttatgaggctattaagatacatcatgagaacaaagctaaggagcttgaagtgagtaacaaacgcttgcttgaggaatgtatgaaagagagaagggagaaggctaaggttaggaagacttttgaggagatgaagaaggcaatggagagtgagagaactgctattgtcgatgagttgaagtcgaagaatcaggagcttttgttggggaagaagaaagaggaagaagagttagtgaagatgg

SEQ ID NO: 844 - DNA, 341 bp, Arabidopsis thaliana
tgaacgatcggggaaattcgagctcggtaccctcgagcggccgcccgggcaggtctcaacaacaccaacactacacccatccaacatgcacttctccgcagcaattctcgcactcgcagctactgtgtcggccatcgatctcaggtcttacactactactggctgcgacggtggctgggtaggctgcctcggcatcaaccctggcgtgtgctgcgtgttcagcgaagaagccggtagcggcaagctgagtgtttctgccaacgccatcccacgtgattggcgcatccaggctgaggcttacaccggcggtggctgccgatacatcgctaaccagcaaaact

SEQ ID NO: 845 - DNA, 340 bp, Arabidopsis thaliana
aaatgttttccttttcccttaacaaaaaatctacaaagtctgaaactctcagcaatcagataaaaagattacaagaaaacctcaaagaggtatacaagtttctttcttaaaacaatctcaagaaaacagacgacatagtcttttaagatggtttgaacacatgctgtctctcttcctcactcgtccagcaggccagcttcctttaatgcactcttatactcttcctctgagttccacgacttgatctccttaacatttgcttcaaaatacttctcgatcttctccatcacctctttatcccagccatcatcaagcagcaagttgaaaaccgctcctttgc

SEQ ID NO: 846 - DNA, 340 bp, Arabidopsis thaliana
ttttttttttttttttttttttttttatttaaaagtataagatagaattaaaaacaaatattacacaacaaactattatattaaaaatttaatacaaaatcaagcaacacaatgataataaaattacatggatgcatattctccacttgggtgatgcagctctttagatttctaacaacatatgtaatgctaccatcctactctataaagatctgaagcttttgatttcccaaccttccagtttttttcgtggtagcttttacttattttttcccagattggttattactaccaattggatcttgtgatatttctaaatatacacaacataacaactcat

SEQ ID NO: 847 - DNA, 340 bp, Arabidopsis thaliana
gccgaacacctccgcgaactatgcgcttcttttgcccttatcctccaactacttgtcggatctgcaattcttcttgtcaattcccaaccctaatcggagctaatcacacctctgctcgtttctcttctcgttagtctctgctccatctcctcctcagatttagggatatttgcttccaatttaacaaacaaaccaagagctattctttcgttctttattctctccgtcttgtaaagtagttttagcagtgagatacatacaaatggagacttccatggggaaacccagcttcttacggaatataatggttcgcgtgcttctctttggtgttcttatcatc

SEQ ID NO: 848 - DNA, 340 bp, Arabidopsis thaliana
gtgtgctttggaagtcaagttgttttgactaaagagcagactcttgcgctcgcctctgggcttgagaaaagcggcgtccatttcatatgggccgtaaaggagcccgttgagaaagactcaacacgtggcaacatcttggacggtttcgacgatcgcgtggctgggagaggtctagtgatcagaggatgggctccacaagtagctgtgctacgtcaccgagccgttggcgcgtttttaacgcactgtggttggaactctgtggtggaggcggttgtcgccggcgttctgatgctgacgtggccgatgagagctgatcagtacctgcccgggcggccgctcg

SEQ ID NO: 849 - DNA, 340 bp, Arabidopsis thaliana
tttttttttttggattcattcagtttattattatttatcgtttgtgtcttttgagtttttacagccactattgtgaaaccacttttcagccgtggcaattggcgtccacatactcattagcataaacttagtagagaagagcatcgaggtttcgtttaccctcaggacctttagagtaccaggaagaaacatattgaccatacacaacttccttgtaagacggtggggagagttgagaaactggtgctatccttgcagtcttggagggatcatgaaaggtagcgactgataaccgcgcccgattcgcattagtcacagctctatgttgagcacttttgta

SEQ ID NO: 850 - DNA, 340 bp, Arabidopsis thaliana
tttttttttttttttttttttttttttttaattgaagatcggtctttcttagtaagcaatatagtcttgttaaaccggaataacttgagggaagaacaagaaaacaaaaagcaatgtagaaaataaaaccgaaccaaagtaatcaagattcaagacaacacccggttctgtgcggagaaaagaaaccggccttttgtttttgtgacatgggtttggtaataacactgaaactgaaaccggttcgtctttaaatatgccggtacgccacaccatgaccatgaatgaatctcgcattctcttcactataaacttcagtctccttctctagcgcgcggacgcg

SEQ ID NO: 851 - DNA, 340 bp, Arabidopsis thaliana
acaatatatatatatcttgtgtttgagtttgagtttgatgtatcacacaagattagcataaattatttgtctccttctctggctctctgcacccattgtctcgtcggttttcttggatcttgcgaattcggcttcctttcattgacagtaggtccccggcctctgcttctgcctctgcctctccatctccctcgacctctcctgttggtggagctgctagagtttgtctctgattcagcttctttgggttcctcttctccttgttcttggctttcaccagcttcttcttcttcgtttcgtgacgttgatgcatgagctggtggaggaagatacataccgg

SEQ ID NO: 852 - DNA, 340 bp, Arabidopsis thaliana
cttttttttttttttttttttgaaatggaaacgaaaattttattagttacaagattgataaagacaaatcttatacagcttgaactaacggagtattaggctttcttgcttacatgataaccatatccattatatggtggtacataacccataggtaatgctccaaacaatgagggatttgttggatcaccgttccctagtcgggcgatgtgagattgagccttttgaagtcttcttgtgtgtctttctcgttctgtgtctgcccatttgacaactaaaggaacagttgaaccctccattttatgttttccgttgatagattccatggcggaaacagctt

SEQ ID NO: 853 - DNA, 340 bp, Arabidopsis thaliana
gcggccgctaaacattaacaacaaaacggtgaatcgtctctaatggcgccaaaggcccaaaggtttggcaaatcatacagggaaatgagtttgtacactcggatttcttctacctctttctctagtcaaagggtgaggctaaagcaggatgtagaacaagcccagcatcatcggtgtgcttgatcttaacttttcttatcctctttttcatgataagcggccatatgagaagggttcgagccacgcgactcaacgggtcttgaagaccatccatttggtagtgaccaaaccgccagtcgcggtcaacaaacggtctccattgaggcttgtcgagaccatc

SEQ ID NO: 854 - DNA, 340 bp, Arabidopsis thaliana
  misc_feature (1)...(340): n = A,T,C or G
cttcagtcacttcacttagaaatcatagatttcgtttctccgtttacttctccttacatatggcagcacgagcctttctctctctcaatcgctctctcttcctcttgtgcttgtaccaatactgctatacctcatctccacgggaagctcaagtacggtgacaatctcgaagacgaatggttcgctgtgtttttactttttcgaatctccgccgcgtttccgtctaattcgattcgtgtttgggacactgacggcgagtttctcctaatcgaagctgcttttcacctnccgcgttggcttaatccggagactagtctcaatcgtgtcttcattcgcggtg

SEQ ID NO: 855 - DNA, 340 bp, Arabidopsis thaliana
ttccaccattatttttcttctccttctacctgggaagctttcatgcgcgttgatgagtccaagtctagggctcagattcagctccagctccgcgttcgtgctctcttattcgataaagccaccgtctctcttttccttcgatccaatacaatcgccgcttcttcatcatcctctgcttccatttctgatgtctcttccgtcgcggtgtctaagctcaatcctaattatttacagctacacggagatgatgtgtactacacgttggagaatgcttctcttgaaagtgggtttcagcgagagggagggattcgccacaatccgagcttaaccaaggtgattc

SEQ ID NO: 856 - DNA, 339 bp, Arabidopsis thaliana
  misc_feature (1)...(339): n = A,T,C or G
aatctcaaagtttcgaaacaagatctaaacaaaaatcccaaaaaaagtgaacaatttcatcttgaatcctcctctccttagtctgccttggaagcaagagcagcagcttgacctctgagacgaccagtcctccttgcagcaataagaccaaccttttttcctggtggtgcatcacgacgaacagtactagcgtgaccaatatgttgatggttacctcctccgtgaggatgctcaactggattcatagccacaccacgaaccttngncgatctcttccttctcctccggccattgacttttcttccgccgaaggcaagctaatcttcaatgaagcgcttc

SEQ ID NO: 857 - DNA, 339 bp, Arabidopsis thaliana
tcgagcggccgcccgggcaggtggcagaactcaacacaagatattgtcgaaatgtaagaaattttttaaggggaagaggcgttcttagtgatctggctacaagaatttgtggaagtggtgacgtatttaccgatgggagaggtccggccttctccttcaactacatttcaagaaactcaggactctcgcttgttgacatagtcagtttcagtggccctgagctagcttcagagctaagttggaattgtggggaagaaggagcaacgaataaatcagctgttcttcaaagaaggctaaaacaaatccgcaatttcttgtttatacagtacctcggcccga

SEQ ID NO: 858 - DNA, 339 bp, Arabidopsis thaliana
tcgagcggccgcccgggcaggtctcgagaaacatctttcttacttcgcttcattacaagatctgatgaaaccagatcggatcttgctctagatccagatgctccttaacttatttactcgaattcatcatcatcgttatcatcaccatgtcactgtttctaaaagacgattcgattcaaatccgtgaagtatggaacgacaatctcgaatcagagatggctctgattcgagaagtcgtagacgatttcccattcgtagcgatggacacagagttcccaggaatcgtgtgtagaccagtgggaacattcaaaaccaacacagagtacctcggccgcgacc

SEQ ID NO: 859 - DNA, 339 bp, Arabidopsis thaliana
  misc_feature (1)...(339): n = A,T,C or G
tacaattgggcaacttgatgggagaattagtctgtataaggaatggaatttcgtcgaacacttggagggcattgnnnggttgattctggaagggttaaaatcgaattgggaagtcgtgggcttatggatttgtgtgtgatggcctctaagcttgcgtatgaaaatgctaaggttgttgaaaacgtcgttgatcttcattggaagatgaatctggtggagttcttggattgttggaatgattatcagaagcagatgtctacacaagtttttgtgtttacggataagcagaaagatgcaaacttgatagtaatcagcttcagaggtacctcggccgcgacc

SEQ ID NO: 860 - DNA, 339 bp, Arabidopsis thaliana
aaatatttgctgtttcattacaacgacaattgctactcaaacacacaagtaaattacatatctcatgatattacacaattgagaaacagaacaagatacagagatctcttgtattaatgtaaaaaaaacaaaacaaatgatgagtagcttcaattagaccagacatggaggaggccgtgtctgtttcctgtgtatatttcattccgttcttcgtcgtagaagagagcggttatgtcttccaaagcctcagcaaccgcacttctccttcgagaggaattccccaaatcactactgctgcagtcctcttccttaggaggaccattatttgcttttatctta

SEQ ID NO: 861 - DNA, 339 bp, Arabidopsis thaliana
ttttttttcagaaataaataaaaagctcatatatatatattattgtaacacatcggatgcattcaaataagagatctaagtggcaggacaagaacccttttcgagcttaagaattccagcaaatggtccggtgagagttcctatatataaattgccctcgaattcgttgacttcgctgagcagagtgtctccaaatttatctttgagaggaattgtttgaagaacttcaccattagagttaactttgactgctgatgggttcgtaggtacgatgatcttgttcaccactgaagcgacccaaaagtttccagtagagccaattcttttgatattgtcagg

SEQ ID NO: 862 - DNA, 339 bp, Arabidopsis thaliana
tcaacaaagtttttattaaagtgggggaaaaacatgaactaaaaaccagtaataaaagaaaagatcattctgcagcattcatcagcatatttagtacatgctgtacttgtcgttcgtcgcttcgggtcgaatgctcttgtagatggacatggcaattggaagaatggctgtgagagcgatttgcaactgatccgagctgctggttctgactgtgatctgtccgctcatcttgttgttaagtcctgcacgaagcgcaatctttgagttccttccaacagagacttgagattggagattggctccaagggctaaatcgcctctccactttaccagagacag

SEQ ID NO: 863 - DNA, 339 bp, Arabidopsis thaliana
  misc_feature (1)...(339): n = A,T,C or G
tccatcaaagactaccaaccattcaaataccaccggagaaagcgagcggtccaagtacagtcattgtcactntcgccagctatcaagtcgggccacaaatctaagggtcgccgtaagctacaacctacaagttggtggagtgaggataagctagaccggctcatcgggtcggactcgtcctctgctaaagatattttggatacattatgtggtgaagatcatgatgaacattgattaaatcattttgtttgagatgtatgatgattatagtttttttcttttatgttttgaactttgataaccaatgatattaattatgggaagaaatacttttttgcc

SEQ ID NO: 864 - DNA, 339 bp, Arabidopsis thaliana
ttttttttttttttttttttttatagtaaattaatgactttcaagtggttttcatcttacttacaaacttataatatgctataatattataatccataaataaaaaataaaatctattaaatatgctatattttttgtggcatcttgtgtagagatgatcatcagttgacaagaagtgccttgataatgtctttgcatttctcctcctcggcgtttagaagatgtccataacctaagacctcatggtacttaatccatggaagcttctctgatatatatcgattaatttcgtatggaatgattctgtcttccatcccttgccaaacgtggaccgatcct

SEQ ID NO: 865 - DNA, 338 bp, Arabidopsis thaliana
ttttttttcgataaaaacggcaaacgagcttttcccattttctttttccttacttgcaaagcaagaaagaaagcaatcaataaaaagtctatgtccccgcacaagttttcaataacattatcatacaaacaacaacaacaaaaaatcatatcgtggcaaatattagaaccggaacaaaaacctaaagcggtttttcagagttgtggccaagacgcagatcgcttgatgactggtttcatgagtttgtcttcttcaagagagatcataccaatgtgtgaaggatcttctagcaacattttcgccactaagtaacctgcgattgaccaagtctggtattt

SEQ ID NO: 866 - DNA, 338 bp, Arabidopsis thaliana
agtctgttacaaatattcatttattctctttgtgtcttttgcgaattattcttaattttcatcgtcactgttttttcccttgaaatgtttcttaaaatggattcttttcttagatgaaaaatcgtcatcagatgtgtttctgaagaatgcaagtgtctcaacatccccatttgcgatgcttgcttcaagctgaacatgaataatgcccaagacaatgcttgtaattggtaaccagctctcttctggagaaatagacagatttgaactcaaataaggaacaagataaacaagagcataaacagcataacgagattttccagtgtcaagccaagcaaaca

SEQ ID NO: 867 - DNA, 338 bp, Arabidopsis thaliana
tctgttttaaatttcacaaatacagaaaacaaaactatttaatttttaaattcctttaaaaagatgacgtatactcaattattgggttctgccagttccattatgtcttgtagcaagaaagagatgttagaatgagaagagcctccttcttccacagccttgtgagctgaatctccaagctctttggctcttcttcttctctcttttgcatcatcactctcacccattaattcttccactgccttcttcactccttctttatccaccaacactcctattttctcctcttctccccatttcataggctgttcaaccccggatcttacaccggcttttag

SEQ ID NO: 868 - DNA, 338 bp, Arabidopsis thaliana
  misc_feature (1)...(338): n = A,T,C or G
gactacgacgggagagaagaagttccgaggagtgagacagcgtccatggggaaaatgggcggcggagataagagatccgttgaaacgtgtacggctctggttaggtacttacaacacggcggaagaagctgctatggtttacgataacgccgctattcagcttcgtggtcccgacgctctgactaatttctcagtcactccgacaacagcgacggagaagaaagccccaccaccgtctccggnnaagaagaagaagaagaaaaacaacaaanncaaaaaatccgttactgcttcttcctccatcagcagaagcagcagcaacgattgtctctgctctc

SEQ ID NO: 869 - DNA, 338 bp, Arabidopsis thaliana
gaatccacgagatggttgaaccttcatcgaacaggtaaaccgggctgaagtacttaacaccttccttcattatcaatctcactctcaacactttcccttcgttgtcatctgggatcagagtcgtaggaagcacttctatgaccgcatccgcgtactgcttttgcgggtcgatgaatgcatcgaagtcgggctttcgggcttcgatactcgctttgatgctctccaaactgtgacctctttcagccatgtccctctgaattttccaagcgaatttgacttcgttgctaatgtccaagtagatactgaagtctagtaagtctcttactccggacgcgtgg

SEQ ID NO: 870 - DNA, 338 bp, Arabidopsis thaliana
atgagctgagtcaccaacaagagccacacgttttgacacatagtcttttgcgtgccttaaagacaaagggaacatcattctctctgaagaaagcttcacaaccttgggaggagtttcaaacctctctttggcagatatggtcgcatctcctgtaagccaagagagactatcccgtgaacttgtagtctctggattaggaccatatccagaatccagagcatcatttacagctttgatgaagtcatcctcgttcatcaattttcgatctgatgcctcttttgggtccatggtccatactatgttgctaaacttgtcaccaatgggaagaagtgcgattg

SEQ ID NO: 871 - DNA, 338 bp, Arabidopsis thaliana
tcgagcggccgcccgggcaggtactaaggcggctaagcaatggggtcctcagctccattccttttgcgttggtcttgagggctcaccggacttgaaggcagggaaagaggtggcggaatatttggggacggtgcaccacgagttccacttctcggtgcaggacgggattgatgcgatagaggatgtgatttaccatgttgagacctatgatgtgacgactatcagagcgagcacaccgatgttcttgatgtcccggaaaatcaagtctctaggggtcaagatggttctctccggcgaaggtgcggacgagatctttggagggtacctcggccgcgacc

SEQ ID NO: 872 - DNA, 338 bp, Arabidopsis thaliana
tttttttgaaaaaataaagtaactttaatataatgtaaacagtttggttttattattctcccccaaagagataaaattaaaatcactctttttccaccccagtgaatcaaatgaaccggccctttattcccatcatctaacacctaaaacgtccatctataaactcaagctgaaaactcaaacagcatcgtgtgattgtacttctcaccagccttaaccacaacagacgggaaattcgactggttaatcgcgttcgggaatccctgcgtctcaaggcacacacccgcatgtttcccgtaaaccgcattccctttcccaaccactccattcacatagtt

SEQ ID NO: 873 - DNA, 338 bp, Arabidopsis thaliana
tttttttttttttttttcgtttcaatctagtaagcgtttaagcaggttcacaatgttacgtagaaataaatacatcactcgcgtgggaactaactgacacatagaccagtcaggccgtagagacattcggtctggtttagtttgattaaccggtttagaatcagcatacatatcttaagctttcccggatttgctaaaggaaacaagttgtttctctctgtgcttctgaacaagtgcttccagattcttcgccttctcgtctccatctttgaaatgtactcttcttccatgtcccggtattagccaattgaaatccaggttgatcaatttttctacgt

SEQ ID NO: 874 - DNA, 338 bp, Arabidopsis thaliana
ttttttttttttttttttttttttttttagagtgaaaaaccctaaatatacaaagatctttaaagacaaggttaagctgttgtttgatattcacaaacgaccacaagacatatgtacactcatgtataaacatatgcacatgtatatatgtgaatgtgatatatgagttacagaccaaagagatgtaaactgtttttgctatataggactctctacttacctactccagctccaattgatgtcttcatgattctcagtcttgtcacagacccgaggaacatctgccaaggaacatctcctacaagcatccaatctccgtctttatcttgatatgttat

SEQ ID NO: 875 - DNA, 338 bp, Arabidopsis thaliana
  misc_feature (1)...(338): n = A,T,C or G
ccacgcgtccgttactctctcttaactaataatattgagatggcagacaatttgaatttggtgagtgttctgggagtcttattggtattaaccatcttccataatccgatcatcgtctacgccggcgagggtgttcccaacgtagctttgttcactttcggagactcttactacgacgccggaaacaaagtgtttctcagcnaaaggaaagatcttccacaaacctattggccctacggaaaatcccgcgactaccccaacggcaagttttccgacggccacatcgtccccgacttcatcgctgatttcatctctattccgaatggagtactcccacc

SEQ ID NO: 876 - DNA, 338 bp, Arabidopsis thaliana
ccacgcgtccgtgagaacgttgtggatccaagactcaatagagattatgagcctacttctgtttggaaggctcttgagatagcaatgtcttgcgtgaatccttcttcggagaaaagaccaaccatgtctcaagttactaatgaactaaagcaatgtctaacattagaaaactcaaagcgaggagtgagagaagacatgggatcaagaagttctgttgaaatgagcacaagctttacaaccgaaattaacccaaaagcacgataacttgtgccaaaaaaaatcccatggttattaaggattttggatttccctgacttactttacaaaaatataatttt

SEQ ID NO: 877 - DNA, 338 bp, Arabidopsis thaliana
acttgccatttcaactgtttcggttgtcatggcccaagtccctcccgagaaacaattcagagtgctcaacgaacccggctacgccccatacatcaccgagtacgacgcgagttaccgattcctcaactcacagaatcagaatttcttcacaattcctttccagctcatgttttacaatacaactcctagcgcctacgtgttagctctccgagtcggaacgaggcgtgacatgagtttcacgcgttggatctgggacgccaatcgcaacaaccccgtcggagacaactccacactctcattcggccgaaacggaaaccttgtgctcgctgagttaaacg

SEQ ID NO: 878 - DNA, 337 bp, Arabidopsis thaliana
tttttttttttagtaaatgaattttctcttcatttttttccaatataccacaaaaattaaacgcagaacaaacacaacaagcattataatcccaatagcaaaaacaaaagaccagtcaatagagaagaagaagaccaacaacaaagaaggtttccattttagcaacccatcactgcgcagttatacacaaacacaccaacattctctttaactccaagcactttccaatccaagtttccatctttagctcccgatttcggacaccaagaattcaccacaatgccctcgccatgaggacctcgttgcccacaaaacaccaacaattgatccccgcacg

SEQ ID NO: 879 - DNA, 337 bp, Arabidopsis thaliana
tcgagcggccgcccgggcaggtacgttaaatggtcagatatgctatttcccatcaccgatctgctgcatgtaggatcttcaccggtgttgtcacaaactttttccacaccacggataacaatattcaaaatacttagttctgtcaaccacacctctgtggggaagtggtgatatgttttttgagggaaaagatgatagtaaggaggcagatgaggaactatgtcatggtcatgtatgatccggaaggtattaggcacaagcaaattgtaataagatgcaaaagcagcattcccaacgcggggttgcccaaatgtcataacttgtacctcggccgcga

SEQ ID NO: 880 - DNA, 337 bp, Arabidopsis thaliana
tcgggagctactggattaaagaagggaaagtggttggagcatttttagaaggtggaagtcctgaagagaacaatgcaattgctaaacttgcacgagcacaaccttctgttgagagccttgaagtgctatctaaggaaggcctttccttcgccacaaatatataaattgcctttctaggttgtgtgttagtgtgagctttgagttcagagtggcttttatgtcactttgctattatgatagcagagtcgacatttttgttatttgtttgacccactttcttgtgattgtttggttccaaaataaaattgaaagctactcaattcacttttctgataaa

SEQ ID NO: 881 - DNA, 337 bp, Arabidopsis thaliana
tcgagcggccgcccgggcaggtaggaactggaacatacttccccaatgcgaaccattacagggatagaccgttctccccaagaggaaggaactcacaccaagctaggtcgccgcgtaacaatggccgaagcatgtcacaagcgcactcagaaatgaattttcctgacagaaacacccgtgagagacagcttcattatcccaaccaaacaaatggttcatgcgatatgagtcacactgattcacttgatagctttcctgataccaatggctctacaaattatccatatgaaaaggctccagactttaggcctacagagcctctaccagtggaagtacc

SEQ ID NO: 882 - DNA, 337 bp, Arabidopsis thaliana
tcgagcggccgcccgggcaggtacaagatccattacggaaaccatatctacagggctaccttccctacgaccagctctgcccctaccggcgttttccttgatctcacaggtggtctggcctttggctactctgtctgcgtcgtcaactcagctagcttcagtgctttgaggcttcaccctgcgtggatgaggcataacctactacccaccaggatggatcgcggagtccgcagcagcttctgatctcgattttgcctgatttgtagttgttgtcatggcttccgtccagccactagggcctgcatgctggatcagctgttgtacctcggccgcgacc

SEQ ID NO: 883 - DNA, 337 bp, Arabidopsis thaliana
tcgagcggccgcccgggcaggtacttctaccaccatatagtagattaagttcagaaccggatgatcaagaacatcaagtgttaaatccttgtcaaaagctgatacagccaccacaacgcatcttatgaggaagcaggtgaagcatatagctgtcacagatccaacctcgtggagtttcttccttcttccttttgactcgatagggaaccttcttagcatgaaaaacaatcttcctccatacagcaagaagcctaatgcggcgatgaaagacacaactgcgataaatatctttccaactaactccacagtgctgttatcatgtacctcggccgcgacc

SEQ ID NO: 884 - DNA, 337 bp, Arabidopsis thaliana
gatctttgatactggtagctccaatctctggataccatctactaaatgttacctatcggttgcttgttatttccactccaagtacaaggctagccagtcatcgtcatatagaaagaacggaaaacccgcgtctatccgctatgggacgggtgctatttctggttactttagcaatgatgatgttaaagttggtgatattgttgtgaaagagcaggaattcatagaggctactagtgagcctggtataacattcttgctagcaaagtttgatggtatcctcggtttgggtttcaaagagatttctgtaggaaactcaactccggtttggtataacatg

SEQ ID NO: 885 - DNA, 337 bp, Arabidopsis thaliana
agaatatagaagagctagagatgttgctggaagcttactttgtcgtcattgatagtactctaaacaagttgacatcgttaaaggagtacattgatgacactgaagatttcattaacattcaactggataatgtgcggaatcagctgatcgagttcgagttgcttctgacgactgcaacgtttgttgtagccatatttggggtcgttgctgggatctttgggatgaactttgagatagacttcttcaatcagccaggtgcattcagatgggtactcataattactggagtatgtggctttgtgatattttcggcattcgtctggttcttcaagtacag

SEQ ID NO: 886 - DNA, 337 bp, Arabidopsis thaliana
tttttttttttttcaagagaaaacaaataacatatacatttctgtttttacaataacatatagtgtctctacaagtagtacaagatgatatagacaacaaataattatactcttacttcctcctcgtatcataaaaggttcattttcacactttctcgttctcttgcgtgtcgaaaatcaaagggaagtcgtcgtcttgttcggagaacgaatagccttgtttctcagcaatagctttcagtgactggtatgcctgaaacattgaccatctctctttaggtcttgaactcacacagttaagagcaatctcaacaaatttcgagatctcttcgtcatg

SEQ ID NO: 887 - DNA, 337 bp, Arabidopsis thaliana
tttttttttttttctctagaagtacttcgttatggcacttgggtttttagtatgtatgtttacaacatttacacaaaacaatgatgagaatacagtaacacttttgctctattttagtctttccctcaacttcctaactatcttgtcaacgggtaaagatcccactggaccaaccggatctagcgactcatcatcggaacactcgtcatcaaagtcatcgtctatgtcactataatactcttcggaccggtccttttcatccacgtaatcctctgctgcaccatcagtatttgacaagaccatagctgtgtaagtgtgttctgcagccagtgaagtg

SEQ ID NO: 888 - DNA, 337 bp, Arabidopsis thaliana
ggatcctctagagcggccgcccttttttttttttttttttagttaaaatctctctaacatagcaacaccatctaacataacaatttgagtttcaattcggattattttagtttacatataatttatacactccgaacaaatgaaaccgttgaagattgattacataacattaaacactaatcaatctttaacttatttagctttaacaacagctttaattgaaccggagtcaccagtaatcgtatcataccggagaaataaatcggcaacgagcaaggaagccgtgagagtgacaatgtccttagctgcacactgtttgttcgacgcgctcggggta

SEQ ID NO: 889 - DNA, 337 bp, Arabidopsis thaliana
cctctagagcggccgccctttttttttttttttttttttttttttttttttttttttttttaaaatgtcaacatttaatgttttatgaagatacagtatgaagtattaaatgtcaacatttctacaacagagaagaagagagcataataacatagctggccttattccacatgtgaaagctcacatttggattcttggattgggttttcatagagaaaaagactatacgttatctttattataatgaaggcaagatgccccactgatgcagaaacccttttccggtggtgacttcgagcaccaagagtgctagcaccgctaacattgctgctcttcc

SEQ ID NO: 890 - DNA, 337 bp, Arabidopsis thaliana
tcaattgaccaacaagacaactactcaatgtgtcgcttttaaggttaaaacaaccaatcctcgcaaatactgtgttcgtcctaacactggtgttgtcttgcccggtgattcctgcaatgttacagtgacgatgcaagcccagaaagaggcaccacttgatatgcaatgcaaagacaagttccttgttcagactgttgttgtctctgatggtactacttccaaagaagtcctcgctgaaatgttcaacaaggaggctggtagagtgattgaggatttcaaactgcgagttgtttacattcctgctaatcctccttcacctgtccctgaaggttctgaa

SEQ ID NO: 891 - DNA, 336 bp, Arabidopsis thaliana
tttttttttttttttaggacaactagtctcctgaaaatagcttaaaatggtaaaataccaaacaagcagatgacggaaaacacgaaacacaaatacattacatctcccatagctttatatgagccactacgtcccttctccattctatttgctactagtagtcgttactattatcttttgtttttttttcccttcccttataaaactaagattttcaggaacaattgcggccttaaaagtgttctgtaacaaagcttggagaagcaacatagccctgcgccaaggtgtccctaaagtcccttcttaaattctcacaaatgttttcacttgctaaag

SEQ ID NO: 892 - DNA, 336 bp, Arabidopsis thaliana
ctaatacgactgactatagggctcgagcggccgcccgggcaggtactggttgtgtaatacaaattcatccgttgtcactttcttcccatcatcattgcggttccagtggtatatagcgtgtgttcggttctttatatccagagtagagtggccatagctagcttcccgaaatgcagaataatctggctgtggttccgtaaaccttccagccagaccttcttgatttcctccgtctccaactgtgatataaacaggcgctgacttatctggaactgggtaacgatctccgcttgacacgttataccgcacatttgatattcggtacctcggccgcga

SEQ ID NO: 893 - DNA, 336 bp, Arabidopsis thaliana
ggaactgagcaagactgttccttccaagttgggttttgatggagaagaagacgcttgggtctttgttaaaaagcagaaaatcttcattgtcttgccttctcttccacttcctcaacaacagcatttcactttggagaaacctgcaatatctcctcaattagaagctgggtttagagaaagcatggaggttacgcaagatagtacctttgttcacactgtggtgccttctcttcctctgcctgaaactcctcaatcacaagctgagttaagagacgctcttgcggatacacactttaccactcctgttcccactgtggtggtacctgctcttcctct

SEQ ID NO: 894 - DNA, 336 bp, Arabidopsis thaliana
gcatttaaaaagatagccaaattttattacataaaaaaagcttaacaagataaatcaagaaagaacaaaatcagaagaataaaaaaaaccaatcataaaaagaaattattgcactcatgcttcttcttaaagaaacaattcaaaatcaataataaggcgtcttgtagacatatggtggtggtggagacttgtaagtgactttaggagaaggagagtagtatggaggaggtggggagctgtagacgtatggtggtggtggagacttgtagtgaaccttaggagaaggagagtaatagggtggtggtggggagctgtaaacgtatggtggaggtgggg

SEQ ID NO: 895 - DNA, 336 bp, Arabidopsis thaliana
gggtagaatataatggcgggttggcagaagaatttacagattgttattcgtcaagttggtaaaagagttaaggacagtcacatttccacggcaaattactcttccacacggaatttggaatcccctttctcacaaggttatttgcagagtctcttgagatcaacctattcctcaagaccactgtattatcatctacaacaactgggaatttctacctcaagacaattgcaggcgggtgaggagcctgtatcatcacctttgtcatctccagctctgctgggtagtggaaaagaagaagagcagaagattatcccaaagcgtcagaaagttcaggct

SEQ ID NO: 896 - DNA, 336 bp, Arabidopsis thaliana
aagcagattaagaagatggaggtcagccagcacagcaagtacttctgtgagttctgtggcaagtacggagtgaagcgaaaggctgttggtatctggggttgcaaggattgtggcaaggtcaaggcaggtggtgcttacacaatgaacaccgccagtgcggtcactgttagaagcacgatcagaaggttgagggagcagatcgagggttaaaagtctgctggctttttatatttggtttccttgttttgacaatttaagttttgcaaactctatgcttgtgattttgaatcaagacttatacattgagcagtttaagcaggtttttatttaaaaaaa

SEQ ID NO: 897 - DNA, 336 bp, Arabidopsis thaliana
cggccgcccgggcaggtacaaaagaatataattgtggttgtgtgtgtttgtttaatcaagattcataatttacaaggaggattatcttctctgttttgtaacgagaagaaaataaagagtgaatgtgaatcaatcgaggtagaagagagtgacaatcttgcgtagatttttggcttcttgacatgtctccataagaagcttactgtcatgaaacgcgaagcagatcacttgttgaacttgtgatatgatgtccatattacacaacctgctggcttctaacaatggcaaatggtcattatgtggcttctctaccacgttttgtacctcggccgcgac

SEQ ID NO: 898 - DNA, 336 bp, Arabidopsis thaliana
ctctagagcggccgcccttttttttttttttttttttgtaactaaaaatcatagagccagaccataattggtttgactagtctttgattcttaatattttcctagaacaggtaaacaaatgcaatagaaagaacaaccaaaaacgttttaccaacaagtaaatggaaacaatataaaaaccataacttaaactgacaattaccaatcaataagatggccagtatccatccaagtccatgcactggctcatctccacatttccaaacccgttttcgccattgtacgaagcactaaccgcggcaacatcctcaagagacacaacaggaggcggctgga

SEQ ID NO: 899 - DNA, 336 bp, Arabidopsis thaliana
tttttggttccagcagaagtcaatacccgaacctctttaccttttctttctcaagcctctttttttcggcccgccgctaacaaacgcggaaatgagattaaacgcaaaaaggtgcgttcttgacttcctttggagaatctcaaaagacttaaaaaaacaaaagaccacaaacattatcataaactccctaaacctcccctttcactcttaccttccgaaaacatcgattaggctccgtcgcaggccagagcggctttaatccgctcgacagtgcatttgatcagactattgactgtagcaactgaaccgagagagagtttagcggtaggaacagag

SEQ ID NO: 900 - DNA, 335 bp, Arabidopsis thaliana
  misc_feature (1)...(335): n = A,T,C or G
gggacaagacataaaccgatactaataccgacaggttaagacaaaaatgcagagaatcaaagtaaaagtaaaaggcattnnnggagaaagctaatttactactaatgtgtttatactattatgtcttgccttttgccttcgtaatttaattacccaaccaacatttgtagccgaggttgtgtttcttcaccatccaccaccaccgccatcgctcttccggctgctgggttcattcccccaaccgccctctccatcgctctttttaccaccagactcgcttccccaaccgccatctgcactgctctttttaccaccagactcgtttccccaatcgc

SEQ ID NO: 901 - DNA, 335 bp, Arabidopsis thaliana
tttttttttttttttttttttttttttttttttttttttttttgaagaaacttaaaccaagatcaaatccatagaaagaaaacagagtaccaacaacattcatataaaagaggaagtaattcagagggtttcataaacctgaaaagctaataataccatatggtttttcagcatctctagaacagtgtcttcacttgtcttccttaacagatgttgtttcttctgcggctggtgccttctctgtcgcaggaccttcctccttaacggcatcatccttcttgtctcctgattttgctgtctcttcttcatcatcactgtcttcaacggacgcgtgg

SEQ ID NO: 902 - DNA, 335 bp, Arabidopsis thaliana
tttttttttttttttacagaatgaggtactctttaagccatacttttgctccttaggcaattattgtacaaaggacactcgtggttagagctgctacataacgagattatacaacttaaatgtgacgacatagagagagagagagaagaaaacagtcagtgcaggtctgaggaacgtttaatggtgagctcggctctgagatggagaatgccattgatgaaatgttgactgtcctcggctatgaacgaagtccatggaatcccgaaaaggtttctgtaaccaaccgctttcccccctgtgaatgtgtagtttcctttgtatttgcttacgtattc

SEQ ID NO: 903 - DNA, 335 bp, Arabidopsis thaliana
agcggccgcccgggcaggtacgttgctcctgaatatgcaaactcagggttgttaaatgaaaagagtgatgtctacagctttggtgttgttctcttagaagcaatcacaggacgagaccctgtggattacggacgtcctgctcatgaggtgaatctagtggactggttgaagatgatggttgggacaagacgatcagaggaagtagtggatccaaacatagaagtgaagccaccaacaaggtcactgaaacgagctcttttgacggctctaagatgtgctgatccagattcggataagcggccgaagatgagccaagttgtacctcggccgcgacc

SEQ ID NO: 904 - DNA, 335 bp, Arabidopsis thaliana
tcgagcggccgcccgggcaggtaaaaaagccaaagctctgagaggagagagagacacacactttggctaatataatccattgcctcaaaccggcaaatcattcttggcttccgtagctaaaacgcattaggtgcagtatcattatctttgagagtttctgtatctttatcgacttactagcactcactacaccagtcttcccagtaaccgaggctctatatccttcaagatcttcttgggcagaaaacaaatgcaacgcgtcttctattccttgcacaccgtccggatgaatatcaaggtgtagcaagagatacggttgtacctcggccgcgacc

SEQ ID NO: 905 - DNA, 335 bp, Arabidopsis thaliana
tcgagcggccgcccgggcaggtctctccttcaaatctccgggaattcaaagctcctcgagaaactccgtgtatttctcgtcacgtgtttcctcttcttcttacgctctcttccttcagtcgtctctttcgcaaaccctaattcgtcagtcgtctctttcgccaacccttattcatcgaagacgaagaagaagaataagatactggtgatcaaccattgcgaagaatcgggaatcggtcgagcaatttggcagttattgtcagcgatgaatgaaattccggtgagttctataaagtaccaagtggttcgatcgttggcggagagactaatcgacga

SEQ ID NO: 906 - DNA, 335 bp, Arabidopsis thaliana
ccacgcgtccggagaaactgttgctataaagaaagttctacaagatcggaggtacaagaatcgtgagcttcaaacaatgaggctacttgaccatccaaatgttgtgtctttgaaacattgtttcttctctacaaccgaaaaagatgagctttatctcaacttggttctggaatacgttccggaaactgtgcaccgcgtcatcaaacactacaacaaacttaaccaacgaatgcctctcgtttacgtcaaactttacacttatcagatttttaggtccttatcctacattcaccgatgtatcggcgtatgtcatcgagacatcaaacctcaaaact

SEQ ID NO: 907 - DNA, 335 bp, Arabidopsis thaliana
tctgtttccctttcctcctgtgaatacatttgtctgtaatatagctggttgtcctgttctgtttccaaggaactcaaagtctatctcgtcatgctcattgttggtagatgatagatagacagctgtgacaactccggctgtgtcaccagctggaagctttatgtgcatactaaaatgtccaaacaaatatgacccctttgattgaaatcctgtgccagtgtatttgtcgaggataagctgaagttcggaaccgccattgaactgtttctggtggtcaaaagcccaagttgggacgtagttacgaccaaatggtacctgcccgggcggccgctcga

SEQ ID NO: 908 - DNA, 335 bp, Arabidopsis thaliana
cgccagaatcgagcggccgcccgggcaggtcaaagagagagagagagagagaaacaaaaatggcgtcacagagttgctacaatggaatccatcgtataaaaagggttcatcctctgattcactctctcacatttcatcgattctcctcatcttctcttccattcaaatctcacattccctcttcacaacaacagcttcgtattcgctcatcttcttcgctttctgatcttggaaatcgcaggcattgttcgtctactcgaggatttcaattttggtcatacaagagaagcgaagcagcgtcgccgttcaagacgaggtacctgcccgggcggccg

SEQ ID NO: 909 - DNA, 335 bp, Arabidopsis thaliana
tattaatatatgtgatcacacaatattacaattataagaaagataccaaatggaaacattacaaagtattgaaaaacaaaaccttttctttttaatctcaaatcatagaggaccggacgctcaactgcttcaatatagtttccagtgtggacccgtcacaagacctccaattattcatgtatgtttgataatgcaaaataaaattattataacctttcttttgtttgtttgttttaacattctggtgtttgggtatggtctcttttcggatcatggcaatagttatagaccaagaagttcctctgtgcccatgtcaatgccgccatctgctgccg

SEQ ID NO: 910 - DNA, 335 bp, Arabidopsis thaliana
tcgagcggccgcccgggcaggtgggaagttactgccgccacggctgctgctacaaaggttaccatggctgctcaaggtgttgttcatatgccggagaagctgttcagactcagcctggtcactaaatctacataatatatcaaccaccatgagtgttcgattgcatttatatatacacttacgtgtgtgtgtatatgacaatacacttacgtttgtaatgaagtgccttaagtttaagaggagaaactatgggaataaagtttcataatgtaatgccttttgtgtttatttaagttgtaatttgcgatgtttgcataataaagttgtttctagtt

SEQ ID NO: 911 - DNA, 335 bp, Arabidopsis thaliana
tcgagcggccgcccgggcaggtattggattaatcaaagacaaagaaaacgaaaatgttggcaatatttcagaaagcttttgctcacccaccggaagaactcaacagtccggcttctcatttctccggcaaaactcctaaacttcccggcgaaactctctccgacttcctctctcatcaccaaaacaatgctttctctatgaacttcggcgactccgccgtcttagcttacgctcgccaagaaacctctcttcgtcaaaggttgttctgtggactagatgggatctactgtatgtttctagggagattgaataatctctgtacctcggccgcgacc

SEQ ID NO: 912 - DNA, 335 bp, Arabidopsis thaliana
catatcatttctaagagttctacttcaaaccaaatcctccggttttttttgtttttctgttttaccttttattatgttacaacactcaaaatcaacacaacccaaagaaaaatgttcaaatcaaaagaaatcacacaaatctgttaaattcctttctcccaactgttgttgccatggaggcagtggaaccaatgctcaaatttcctactgatttaagtgtcttgtgcttctcaagaaccacacctccaggtgaaccaggacctctgtggctgctgctgttgctcatgaccaatgaccctttgttccatctaaacgtatcttgcgtggggggatac

SEQ ID NO: 913 - DNA, 335 bp, Arabidopsis thaliana
  misc_feature (1)...(335): n = A,T,C or G
ttttttttttctgattcaagcaacatcctctgtcccgtagtaatgcttataatctcccaacagtttaagctcgaacttacattagaaagccctaacggcttaaaaaccaactcaataaaaataacaaccacgaaaccgcaaaatacaaatcacactttgagctgaagtgtatgggaaaccacaagaacacacaccgaacaaccgcggtttataaaagagttaagttgttaccnnaaaagatgattttaaacaagtgcgatgcttgtctctccacctggtnntttacggacaccgcctaaatagtctcttgcttctactttcccatctgcaaatat

SEQ ID NO: 914 - DNA, 335 bp, Arabidopsis thaliana
  misc_feature (1)...(335): n = A,T,C or G
ccttttttttttttttttttttttgggaataaaggtgaataagaacacaaggaccatgttcataacaaatccagtaggaaaattcttatcggagaacagatgttcagattcgtttctatatgcaaagtgatgatattctagctattcaaacggaaaagatggttactgcctcatatttganngatgaaaaatggtttccagttttctcaagcccaaagaatttatctcatccccggttcggctgcctactgcggatccttgttgcggttctgaagagaaaatcgtggttcaccggtgtgacctggtttctctgtgtcaaatgatattgagcctga

SEQ ID NO: 915 - DNA, 335 bp, Arabidopsis thaliana
  misc_feature (1)...(335): n = A,T,C or G
ggccgccctttttttttttttttcttcaatcaatatttgtttaacgaaataagtttcaagagaagacaagctactatgatttnnngtctcaagagtcttacatttttatactgaaaaccaaacttatagagctttacatttagaaaaccgaaaaaactatcaatcattaggttagcctttggattcacgacgacgtatcagatttgcgttcagcgtctgcggcagactgcatttgagctgcgtattgtaagttccagagaacatcttcaaaggaaggtcttgcggaaggttcaagcaaaacacatttattggcgattgagatcgcaatcgataaa

SEQ ID NO: 916 - DNA, 335 bp, Arabidopsis thaliana
  misc_feature (1)...(335): n = A,T,C or G
gcggccgccaaaattttgcaccatacattgagcaacttgccgctggaaattttggtcaattgccacatgaaggccatcagagggaactacttgaacagctactttcaacaaaaatgcaatctcaatatggaccaatgcaatctccatacggacaactgcaatctgaaccaactcggtctttggagtaccaactgctgcagcaagagcagctgatgcaattggcaaacggagnnnggcacaatacactattggaggaacagagacatattgaccctctgtggccatctgaccataatgatcagcttctaagaagtcatcctgggatccaacgttcg

SEQ ID NO: 917 - DNA, 335 bp, Arabidopsis thaliana
  misc_feature (1)...(335): n = A,T,C or G
aaacttcatcttcactttctctcctcctccatggcggacggtggggctgaacctccagctccaccatcatcgataaacgccggtgaatttctcttgtctattttgcacggaagtccttcgccgtcgtcacaaggtcctcagcatcatcagtcattcgctctcgatccagccatcgcagccattggtcctaccgtcaataatccttttcctccgtcgaattggcaatctaacggtcatcgacccagtaatcataaccctccttcnnnnccactcgccttttcacctcctcataatctttcccccaatttcttagggtttcctcaatttccgcctag

SEQ ID NO: 918 - DNA, 335 bp, Arabidopsis thaliana
  misc_feature (1)...(335): n = A,T,C or G
acctaagatcgctcttcgtctcaaatcagtggattatgattacgttgaggaaaatctgtttggatccaagagtgagcttcttctcaaatcaaacccggttcacaagaaagtccctgttctcctccacaacaacaaaccgattnncgagtctctcaacatcgttgaatacattgatgagacgtggaactcatctgcaccgtccattcttccttcacatccttatgatcgtgctcttgctcgcttttggtctgacttcgttgataacaagtggtttccggcgttgagaatggcggcgatcactaaatcggaagacgcaaaagcgaaagccatggaag

SEQ ID NO: 919 - DNA, 334 bp, Arabidopsis thaliana
ttttttttttttttttttagaaagaaaatatggataatttccactaattttggagaaattgaatacaaaaaataaaaaatacaggaaatacctaaattaaaatataggctcagagcttttctgacccaaactcaaacatatacgggtattacgggtttcgggtcggaccgggatagctcgattgacatgcctactcttgtttcaatgaatcaagagttataaggagttctttgatgtcgagtatcgatagatctcgaaacaaagaattcaaagacttcaaagttttgagaagaaatctccatcatgtctgaaaacaactatgtcgacgactcgg

SEQ ID NO: 920 - DNA, 334 bp, Arabidopsis thaliana
  misc_feature (1)...(334): n = A,T,C or G
tttttttttttttttggttgtggcaaatattaattaattaacgcaaaaatatatacaaaattctatcctccaataaaggagaatccaaaatccaaagagctgtaataatgtcccaaactcaaaagcttctctggtggaaattttctcaccgtaagtgggagaaaaacaaataaaaagaagaaaaccctggcttctatcatcggccttcgtgaagatcttctgagaaaacagttgttcgtgtaatattttcatgatcaaaagcgcttagaccagaataaggancagaagagaacatagaagaggttacttctgactcgaacgtagctgatgattg

SEQ ID NO: 921 - DNA, 334 bp, Arabidopsis thaliana
tcgagcggccgcccgggcaggtgttgcaatgtcttcctttgatttcctcaatttctagggtttcgaaagaaaaaataatgacttcaatcgaattgctaagtccattgattcacgataagtttcgattctcaacttgttgtagtactagtagtttattgtatttgcatgcttcgagctttttccgagatcgatcttttggttttcgtcagaatccgaatcgattcgtctccaattcatcgattcaacttcctcaatcagttccagggtcgataaaccaggaaaggtttaatctttggcaagggttttcgaggaagaagagtacctcggccgcgac

SEQ ID NO: 922 - DNA, 334 bp, Arabidopsis thaliana
  misc_feature (1)...(334): n = A,T,C or G
tcgagcggccgcccgggcaggtaccatatgaagaatagtattgatggctaccgatctcttatctacaatggtgaccatgatatgatggtgcctnnccttgcaactcaagcctggataagatctctcaattattccatcactgatgattggaggccttggatgataaacgatcaaattgctggatacacgagaagttattccaataagatgacatttgctactatcaaaggaagtggacacacagcagagtataaaccaaaagagacctctatcatgttcaaaagatggatcagtgcccagcctttgtaaaagaggatgatggtctttgcgtatg

SEQ ID NO: 923 - DNA, 334 bp, Arabidopsis thaliana
  misc_feature (1)...(334): n = A,T,C or G
ttttttttttttaatattgaaacattgaaagtttcgatttatttcagatactgtatataacacactagatattacattaagcttcaatgtagttacaccaattaactggtgttaccagttacggatggcatttggttttgtggaatcggttgttcgttccttactcttcttgatgatgagaacaagttagcactgaagctggtatagaactgtcttccacttctagtagcattgttaataccatcgcaaagtgataagcttcctccaattgnnnacgatcttctcacgttttctactcttcctgagccacagtagtttgccaaatcactttgtg

SEQ ID NO: 924 - DNA, 334 bp, Arabidopsis thaliana
  misc_feature (1)...(334): n = A,T,C or G
ccacgcgtccgaacagaggagaaatatggaaacacaaggcaaagtaatcacttgcaaagctgctgtggcatggggagctggagagcctctagtaatggaagatgtaaaagtggatcctcctcaaagattggaagtgagaattcgaatcctcttcacttccatctgtcacactgatctcagcgcatggaaaggcgagaacgaggctcagcgagcataccctcgaatccttggccatgaggcagcagggatagtggagagcgtnnnggaaggtgtggaagagatgatggcaggagatcatgtgctccctattttcacaggagagtgtggagactgc

SEQ ID NO: 925 - DNA, 334 bp, Arabidopsis thaliana
ctaaatcaagaacttcaaatcttgaaactttctaaaaagatggagcttattcctgatcttcccgaaactgtagcctacgagtgtctcctacgctcctcctacaagcaattccctcttatggcctctgtttgcaaactctggcagcgagaaatcagcctctctgattttttccgacaccggaaagcttcaggacatagtcaagagcttgttgtcttgtctcaagctcgggtcgacccggttaaagaactcgtatcgggtaataaaaccatccccacccccgtgtaccgaatctcggttcttgaacttggtaccggtctaaggagcgagctgcctc

SEQ ID NO: 926 - DNA, 334 bp, Arabidopsis thaliana
taagcagtcttgactcggagtttgtcagcagttactggatctcctggtgcagattggggtgttattagtggtggaacagctggttatagcgagtagaaacattcaagtaatggtggtgtgttattaatgatggaatagctggttatagtgggtagaaacattcaggaagcagattcatgtcgcgtaaaagagaagacttgattcttggtgtagcatataggatggccaaaaaattaccagtctaacatataccctgggtgaatgctaagttcgtatggtgatacttgaacattagcgtttcctctttgccctttgtatagtttcttcttagagt

SEQ ID NO: 927 - DNA, 334 bp, Arabidopsis thaliana
aaaagtgattattagaacattacaatgtttaaacgactaaccaaatctgatacagtacaaccgattcccatgggattaatacttacgctaagatcaacactgaaccatcttagacgtcgtcgtttaacaacatacactagtcatggcaagctacattacttaagtgagaaattaaaaaaaaccttcaaaatctctagattgtgaacctactatatgtacagaaaccaaaatgcatatttatcccaatcaatcagcagaagcagtccattcttccggctgcggagagaaaaaaactcgccggaagattggattacgacgaaggtgagataggatt

SEQ ID NO: 928 - DNA, 334 bp, Arabidopsis thaliana
  misc_feature (1)...(334): n = A,T,C or G
atcctctagagcggccgccctttttttttttttttttagttcaacgattttcacagacgtgaaatttatttgaaaatcacatattcaccacatacaataatacatatctcgaaattcttccaaacacccaaaaaagttgacaaaaggaacataaaaaccaatataaaagatatttannncaaaacaaaaaagttgcgaaagaaaaagtaagaaacacttttagttaacaaatgcacatgttcttcgaatctccccatccgaccctgttttgaccccaatccttcccattttctccatggagttggagaactcagcaaagaactcttgctccgat

SEQ ID NO: 929 - DNA, 334 bp, Arabidopsis thaliana
aaaaagttgatatactttctggttttctccttaacttttattctttacaaatccatcccccttagatctgtttatttcccgctactttgattcatttctgttagtaatctgtctttcgtatagaagaaaactgatttcttggtttgtattttcttaaagagatcaatctttttttatttttgatcttcttgtgtttttttttctttgtagaattaatcgtttgtgagggtatttttttaattccctcctctcagaaatctacacagaggttttttattttataaacctctttttcgattttcttgaaaacaaaaaatcctgttctttacttttt

SEQ ID NO: 930 - DNA, 334 bp, Arabidopsis thaliana
tacaagattggtggctgatctgcttggtaagctaagccttaacgtcagagagatccattctagaaaaccgcagagttacagaaccagagtttctgatgagttccgcaagtccaagagtattatccttgtgacatctgatgtatctgctcgtggtgttgattaccctgatgtgtccttagtcgtacagatgggattgccatcagacagggaacaatatatacatagacttggcagaactgggcggaaaggtaaggaaggagaaggtgtactattgttggcaccgtgggaagagtactttctatcttctgttaaggacttgcccatcacaaagtct

SEQ ID NO: 931 - DNA, 334 bp, Arabidopsis thaliana
cctaacttctatgatcagattgttagtaatctcgtcttcaacaatattgtttctggtgatgggtttagctgtggtggaatcagagatggtgggatgctctgttttggtcccaattcttctaatttagggtttaacacaacttctgataacttccaagtcttagccgccggtaaaaactccgtttgtgctattcttaatttatctcgagaggttaaatgttggggagaagatgaatcttttgtcaattctccgatgaatgattctcgattcgtctcgctaaccgcgggtcctcgccatttctgcggaatccgtgaggataatcatgaggttgagt

SEQ ID NO: 932 - DNA, 333 bp, Arabidopsis thaliana
tatatcatctgcttttcctttttgttttatatatatgaagaaagttggtagagagggagagataactcatcacagtcaaaggcacattacaaattacatatggggtagatatatattatatacgatgataataatgatgatgatgatggatggtcatgatgatgatgatgatgatggattggttcatacagagctagtttcggagaggccaaattcaagtccccaaagctcaaaagcacccttgacgaagtcatagtagcctcccttcaaagcaagtgttcccttcacaagtccttctctcacaaatggatatgtcaataggtttgctagtga

SEQ ID NO: 933 - DNA, 333 bp, Arabidopsis thaliana
tcgagcggccgcccgggcaggtacaagtgaccagactttgcttttactgtatctactctccttccatcatcatcatcttcaataagagatggcttagccactcccatataccaaatatcacctcctattgatcctagacactgtgtcacctttgcgtgatgcgtgatcttgaaaaaccctaagggtgtttctttcagcctaagtatatagagccgtgggattcctttagagagatccaattgagcgtcgttgggaccgtaaccggccccatcacgagaggcttcgatgacttgaccatactctgcgaaggtctcaggtgtacctcggccgacc

SEQ ID NO: 934 - DNA, 333 bp, Arabidopsis thaliana
cgagcggccgcccgggcaggttgacgctgcttcaaggctattcttctgctgaagaagaagaagcagaggagagagcttttggggattacgacaactccgacgaagatggggataatgatgttcggagatatgaatcgtcttctgtgtttgatttctctgcatctgcctcctccgctaaaaacgccggccttccttcagctgacgacgttttctctcagatttcagggccaccggagtttctaaacaaccgcacagaagcagataatgaagcttcagctagagatgcagaacatgcaaatcgtattagtcgcaaaaaaaaaaaaaaaaaaaaaa

SEQ ID NO: 935 - DNA, 333 bp, Arabidopsis thaliana
ggaaagtaaacctagccgagcagatctaactctctctctagtactcagagatggccaagtcgaagaatcacacggcgcataaccagtcggcgaaagcccacaagaacggaatcaagaagccaaggagacaccgtcacaccccaaccagaggaatggaccctaagttcctgaggaaccagaggtacgcaaggaagcacaacgtcaaggccggcgagaatgctagcgctgaagaataagtgttttgattatctgtgagacattttgaagtttttttttaatgaatttgagactttcttagacaaaggaaccaatttactttgcgcttttgatcat

SEQ ID NO: 936 - DNA, 333 bp, Arabidopsis thaliana
tcgagcggccgcccgggcaggtacctataaagacctgtgaaagtggttagaacaagttcatactcctgcccgagtttgacttgagagagcggcacaggtttatcttcgacaaagtcaccgtcaatgcatatgtctgattgattctgccgcctgtaaagtggtataaactcgaagtaactaaaagtgggaatcacagcaaagctcacgtcttctgggggaagatgaggatcaacgttcacaccaatccagctctcggttgacccgtaatctgcgctcaccaggggcaaaccgccagcgtaatgcctcagcttattcaggtacctcggccgcgac

SEQ ID NO: 937 - DNA, 333 bp, Arabidopsis thaliana
caatcaccagtttcagctttactatgaaaatggatgcagaaactcatcagaccataagggtaaaggcaagaactgatgatattaattattgcatctttggttttgttcaaatcctcattttgtatgtttatctttggtttatttcaaaacaaatgttaatctcttttgttgtctgatgtgtgttagggttttgttctacatatgtattgagggtctttggaaatctttttgcattgtgcttgtaatgttgtattttgtgataatagcattttgtttgtgagtttataattcaatttttgaatgttatttttgccaaaaaaaaaaaaaaaaaaa

SEQ ID NO: 938 - DNA, 333 bp, Arabidopsis thaliana
ccacgcgtccgcttcttcgacttccagataaaatcgcttcctctgtttttttccgatctaaattcacagctcatcgaaaatgggctcacggcaaggaccaccgaagcatcagaacaaattcgcctgggttcccaaagccggcgtcaagatcaacgaaacggaagtcggcgggagatttagaccattatccgagattaccggagtttgctaccgatgtcgagagcagatcgcctggaaacgcaaatacggcaaatacaaaaccctaactgaagccaccaaatgtcagaagtgtacaaagcgaaatgttcgtcaagcataccataagttatgccc

SEQ ID NO: 939 - DNA, 333 bp, Arabidopsis thaliana
tgctcttctaattcgtaagtaattttccagatccaacctttctcagattcgctctttcccgagaaaatttgaagaaacagagattcatcattttctcttcctctcaaaaatcagatctgcaaaactctcagatcactcatgggtttgatttcaaaccctacccgtttgattctcgtcgccaccatcttcttcctcgtttcttcaatctccggtcaggattctgtcgttgagaacaatgagagacaagaatctgaaggatctggtaaagagcttggtcgtcgtggaatggttggtactgaacgaattggagttgatactgttgtagacaatatt

SEQ ID NO: 940 - DNA, 333 bp, Arabidopsis thaliana
ccagagaaggaggagaaggtgatcgcagtcaagcaaggtgattcgattgctcttccctttggtgtggtcacatggtggttcaacaacgaggatcctgagcttgttatcctcttccttggtgaaacccacaagggtcacaaagcagggcagttcactgagttctatcttactggcacaaacggtatcttcactggtttctccactgagtttgttggcagagcctgggaccttgatgagaacaccgtgaagaaacttgttggttctcaaaccggtaatggcattgtgaagcttgatgcgggctttaagatgccacagcccaaggaggagaaccgt

SEQ ID NO: 941 - DNA, 333 bp, Arabidopsis thaliana
gcggccgcctcgaatcctctattgcagaattttgacttccctccgtttgactccgttgatgctcaccatgtcagacctgggattcgtgctctgttgcagcagctcgaagctgaattggagcagctagaaaaagctgtagagccttcatggccaaaactagtggagccattagagaagattattgatcggttatctgttgtttggggaatgatcaatcatcttaaggctgtcaaggacacacctgagcttcgtgctgccattgaagaagttcagccggagaaggtgaagttccagctcaggttgggacagagcaaacccatttacaatgcattt

SEQ ID NO: 942 - DNA, 333 bp, Arabidopsis thaliana
aatgcgctcaaacttggtaaattcaccaacttcctcgcggttcttgccttgtaaggtctcgagctcctcttttcgatactttttaagaggctctggtgtttgggaaggcaagtaggacttgtcggagaagaatatccgcttggttgggtcaacggacttgggggccacccatgactcacatgtaaacgttatcgacccgccgggtaatttaagctctacccccttgaggaacaactgtcgatggtattggttctgaatcttgatggctcccactggtccaaagtcttcaggcatctcaaactcgcactcgtacctgcccgggcggccgctcga

SEQ ID NO: 943 - DNA, 333 bp, Arabidopsis thaliana
tcgagcggccgcccgggcaggtcgcatgagacagcctggtagcttgcccctgtctccaaccgcccctagttttaagcgcacttctagttctggtagcaaggatcacacaacgttttccagaaggaaaaacaaggatacatccaaagaaggttactgcaatttacgtgatgatgatagatgcagtacaaggagtgccaaaaatcgtcggtctcctgataggaggacacaacaagacagtggaagcagaggagggagtttgtgttccaaaggggaagaaaatgaaaccaccaaaacctcttcttattcctctcggaaagtacctcggccgcgacc

SEQ ID NO: 944 - DNA, 333 bp, Arabidopsis thaliana
tcgagcggccgcccgggcaggtacaaactcatcacatggcagagttgctagacatctaaaagatatgatcaaaacaaacacaaaagacaatgatcggctaaaagataagctgaagccattattacacataaaccaaacctaaaaacaccatcctatatatggtttacttattgaataacttaattaattaaagagactcgattatctctgcttatttaaaaaggcttcttcacttgcaggtgcaaggatcacacttgcagtcagatccacacttgcaagcatcgttctcagcgttgttactctcccctgaagccttgtacctcggccgcgacc

SEQ ID NO: 945 - DNA, 333 bp, Arabidopsis thaliana
tttttttttttttttttttttgtatcttagaacaaaaagttaccacctttatccaaaatttttacatgaccatgatgactccgtaatcagttacagcatatgagtattgattctattaattcagtcccagttctgatgacttgtctgccaatcatcatcatcttctcttggcggcctcaccaccaaaacaaccatccctaaactctccttcacctctctcgccttcaaatctgatcctttctctagcttaagtccgttctcagccaccacgagataatacccgtcatcagcctccacaacattcctcaccctatcggccactaccagtaaagg

SEQ ID NO: 946 - DNA, 333 bp, Arabidopsis thaliana
  misc_feature (1)...(333): n = A,T,C or G
tttttttatagatggtgacactcaagatgattttatttcaaccaattgcacatacttggtaacacatacttctatttctgcctatccaatttaccctccaatgtcacatgcaaannnaaaaactctccaaagcgagattaaaatttttcaattacctaatataatgaaagataagatcttaacaagtgacaaagggaanaacagtaggatttagtttggcttcggtcggaaatctatcatcataaccggttcaacagatcaattcattgagccaccatctaattggtggagagtttccaagccgaggtggctatgagcggtcgtgtgtgccaa

SEQ ID NO: 947 - DNA, 333 bp, Arabidopsis thaliana
  misc_feature (1)...(333): n = A,T,C or G
tttttttttttttttttttttttcttcaaagcctaactaaatatactctaaacaaagttgtagattcaaaagtaaacttgcaattaattcatcagttttcacaagagcggggttttgtttaacaaaccattgaagagctttacaaaatctattataacctctttcttctctactctctactttgtccttcaacaaaacaatggctctctctctctttttgtgtgttatcaaatgatcttgttccttgcgtcttcgagcttcttcagaatctccgcanntgttctatccaactcgtctgctatcttcctctgcaagtccattggaagtgtcggg

SEQ ID NO: 948 - DNA, 333 bp, Arabidopsis thaliana
tcacctcacgaagtataatgtacattcaaaagttcctctggtcccaatgcagaacggtattcatcctatggcatctgcgcagtgaacaacatgcccatgggatacccagtactacaacatcctcagatgcatgctcaaggtcatccccatcttgatcctatgagctgtggaatgtcaagctgccatgtggttaatggagtccctgcacctgctaatttccaaccaatgaggatcaactcagggaatgatatggtaatagatacaaccatggctgaaccaactccaatgattccaccaaatagtggtatgtcggatatgccagtaagtccagct

SEQ ID NO: 949 - DNA, 333 bp, Arabidopsis thaliana
  misc_feature (1)...(333): n = A,T,C or G
ttggttaggtgccgtgtgggtgtggtgaagtcagttacggagggaccgaggtattacaatatccctgtgccagtttctaacttgggacaacagttgggaaatttattggagagtgggaaaggctgtgatgttgttttccaagttgatggagaaaccttcaacgcacacaaatnggttcttgcaacgcgttccccggttttcaacgcacagctttttggccctttaggagaccgaaataccaaatgcataacgatagaagacatggaagcacccattttcaaggattgtctattcacggatgtaccatccgggatcttctcctggggcgctact

SEQ ID NO: 950 - DNA, 332 bp, Arabidopsis thaliana
  misc_feature (1)...(332): n = A,T,C or G
cggccgcccgggcaggtacctaacgtcggctttctctagccgttccatggcggtgttgacataatcggcagagataagctcaatatccgcggnnngttgtgtttcccggccatatctatcatttcctgggtctcttttatccctcctatcatacttcccattaccatcttcctctcaaagatgagaggcatgacaggtagctcgagtggcttctcgggtgcaccaaccataacaagttttcccttatgcttcagcaaaccgagcaacggaagaagtgaatgagtcgcagagacggtatcaattataccatccattgtacctcggccgcgacc

SEQ ID NO: 951 - DNA, 332 bp, Arabidopsis thaliana
tttttttttttttttttaagcaaaaaaaaaaacttcacttattcacaaacgcagttcaaacttaaagtaacgaaatttagtacactgtatagaattgaaaactgtatttcccttctctactttggtgtgtttaccacctcttgttcactctcttctgcttctactttggttagggactcttaaaccactttaaagccgtgttgaaggatcaaagccattagatttaccattactcttctcaccattcacgaactcgtgatcattatgatcatccatgaacctagcccagaaccaatgcttcttccaaactctctcagtcatctcctcgatag

SEQ ID NO: 952 - DNA, 332 bp, Arabidopsis thaliana
tccctgcagttatcggttctactgtttcctggggcttatacttctttttttatggaagagccaagcagagatacgctagaggcagggatgatgagaaactcagccctgctctccaccttgcttctgctgctgaagcaggggccttggtctgtttatgcacaaatcctatttggcttgtcaaaacaaggttacagcttcagacacctcttcatcaaactcaaccatactcagggcttttagatgcctttagaaccatagtgaaagaggaaggacccagggcgctctacaagggtattgtccctggtcttgtacctgcccgggcggccgctcga

SEQ ID NO: 953 - DNA, 332 bp, Arabidopsis thaliana
  misc_feature (1)...(332): n = A,T,C or G
ccacgcgtccgacttctttacttttgtgttttcacaatttgagaaacgaaatggagccaaagtttcatgcttttatgttaccatggtttgcttttggtcatatgattccatttctacatcttgcaaacaaactagctgaaaaaggtcaccgagttactttcttgctacctaagaaagcacaaaaacagttggaacatcacaacttgttcccagacagtattgtctttcaccctctcacagttcctcctgtcaatggcctccctgctggtgccnnnacaacctcggatatccccatctcgttggacaacctcttgtccaaagccttggatctc

SEQ ID NO: 954 - DNA, 332 bp, Arabidopsis thaliana
gaaaacagaaattgaaattactgtctactttgcaagtctttaacaacttttgcgcaaaaaccaaaacgaacaaaatggcatatcatctaaagataacaaacagaagaagacatcaaaaactctactacccttaaacatttagctcaatcggaatcctcttctcaccaaaaggagaagcaaagtatcaccaaccataatgattctcttcttcaagacttgattcagtaaaagaagccaagaaccttgccaccaacattctttctcctggcttcttcgtggtccataataccagccgaggtcgtaagaacaatgtacccaaactgtctggaagg

SEQ ID NO: 955 - DNA, 332 bp, Arabidopsis thaliana
gcggccgcttcatctcgtaaacctcaagaccctccgtcttcttcttcttcatcgccaccgcgtaaaccttccggcgatggatcatcaagcaaaacatctttatcaaccgttgattcccaagcccgtctcgctatgtacatagcaatggctcacgctggtctcgctttcgccatttgtgttctgtatttcgtcggaaagctattacaagagtatctaagaccgattcaatgggcgattctctgttcgattcctttacgaggtattcaagaaacccttgttgatttctggagcgagcctttgaaattagggcttacggaagttgttctcgctgt

SEQ ID NO: 956 - DNA, 332 bp, Arabidopsis thaliana
tttcagatctaccagcacatctgaagagggcttgcataagctataggggagaattgacatctttgtatgagtatattccacgtatgaggaagtcaaatccagaagaggcacaagataatattatcgccaacggggtttccagccagagaacattcaacatattggtatctctgagcggacacctatttgataagtttctgataaacgaagctcttgatatgatcgaagcggctggtggctcatttcatttggctaaatgtgaactggggcagagcgctgatgctgaatcgtactcagaacttgaagttggtgcggatgataagagagtattg

SEQ ID NO: 957 - DNA, 332 bp, Arabidopsis thaliana
gctcatctccttttttgattccttgactaaattataaattagaatgataaaatgataagagtggttagagactctgattgagacacaaagtgatatcctggaacaccttgagcctcttcttgtccactttggtttctgttcctaaaacagcagccatgatcgcatcttcaaagtctttattgtctggtaatccacactccgttgctttcttctccattgacaatctccttctcgtgcttgtgtttgtctctccctcatgatcaccaccaataccactcaacatccccatcccttggctcgacgatctcgttctcttcagcttctcgttgtta

SEQ ID NO: 958 - DNA, 332 bp, Arabidopsis thaliana
gcggccgccttacacgtggcttgaagagataaggctgaagaggatggtggtcaccgacgattgcttggagctcatagccaagtcttttaagaattttaaggttcttgtgctttcttcctgcgaaggcttctccaccgatggtctcgctgctatcgctgccacttgcaggaatctgaaagagcttgacttacgagagagtgatgttgacgacgttagtggccactggcttagccatttcccagatacatacacttctttggtatcactcaatatatcttgcttagcatctgaggtcagtttctctgctctggaaaggctggtgactaggtgtc

SEQ ID NO: 959 - DNA, 332 bp, Arabidopsis thaliana
  misc_feature (1)...(332): n = A,T,C or G
aagaagaagaatctggctcatctggagaagaatctgaatcttctgctgaannnncgaaaagtcgagtcttcgcaaaagcctgaatctgactctgaaggcgaatctgaatcggagtccagttctgggcccgagcccgagtccgagcctgctaagacgatcaagctgaagcctgttgggactaaaccaattccagagacgtctggatctgccgcgactgtacctgagagttcaacggctaagcgtcctttgaaggaagctgctcctgaagctattaagaagcagaagacatcggacactgagcatgtgaagaagccgataactaatgatgaggt

SEQ ID NO: 960 - DNA, 332 bp, Arabidopsis thaliana
cctggccagaagatctgcaaaacctcatcgatttaacacctgatgaaactatcagcagaactcctctagtagaccggtggctatggcctggcattgctcctccagcatcaaaaggacgagtggttctcgttggagatgcttggcacccaatgactccaaatcttggacaaggtgcttgttgcgccttggaagattcagtagttctggcaaataaacttgctagtgcaataaacggcgagaccgaatcaatagaagtggcaatggaatcatacgggagtgagagatggtctcgagcattcccgttgacagtacctgcccgggcggccgctcga

SEQ ID NO: 961 - DNA, 331 bp, Arabidopsis thaliana
tcgagcggccgcccgggcaggttgaaatttgaagaagcataagtttgtctatgaaagatggaatcaaagacgttctggatcgttactcttcttctctgtggaacaattcaattagcgatttgcagatcagaagagaaaagcacagagaagacgatgatgctaggaggcgttcatgatctccgaggaaatcagaacagtggagagatcgagagtctcgctcgatttgccattcaagaacataacaaacaacagaacaaaattcttgagttcaagaagattgtcaaagcaagggagcaggtagttgcaggaacgatgtacctcggccgcgacc

SEQ ID NO: 962 - DNA, 331 bp, Arabidopsis thaliana
tgctgaaaaatggcgaactcgagaactgtcttaatcttgtgcggtgactacatggaagactacgaggtgatggttccgttccaagctttacaagctttcggaatcaccgtccacaccgtctgccccggaaagaaagctggtgactcttgccccaccgccgttcacgatttttgtggccaccagacatattttgagtcacgaggtcacaatttcacgctcaatgcaacgtttgatgaagttgaccttagcaagtatgatggattggttataccaggaggacgtgctccagaatacctggccttgactgcatctgttgttgagctggttaaag

SEQ ID NO: 963 - DNA, 331 bp, Arabidopsis thaliana
acattctccttctccttctcctcgtgaagacttttctctctgtttattttttagggttttcgtaagaacagagcaaaaaacatgtttggaagaggaccttcaaggaagagcgataacacaaagttctacgagatccttggtgttcctaagaccgcagcaccagaagatctcaagaaagcttataagaaagccgctatcaaaaaccatcctgataagggtggtgatcccgaaaagtttaaagagttagcacaggcttatgaagttttaagtgatcctgagaagcgtgagatctatgatcaatatggggaagatgcactcaaggaaggaatgg

SEQ ID NO: 964 - DNA, 331 bp, Arabidopsis thaliana
  misc_feature (1)...(331): n = A,T,C or G
aagaatcatatatcacaagataacaaaaatacgcactaatgaacctttggtcaacttccgtannnagttacaaggattggaatttagctttcaaacttcaactaattttacccacgccatgctgctaactcaataatctttttatagcttagtggttggctaatcaataatcactctaccaataatctttacaggaacaatctccattcttaaagtggtgcaagcatcttgtgtcctccaacaatatgtcacagccgtatctcttagagacgtactttgcagtatcatggcagtctcggcacatcctaagatttttcaagatccttatcgt

SEQ ID NO: 965 - DNA, 331 bp, Arabidopsis thaliana
  misc_feature (1)...(331): n = A,T,C or G
ggagagttcacacaaaaacgagtacaaaaatatttcaagaaaaaacaaactcatctaaacatattttgtggagtacaaaagaaagatatgaagaaaagaagaaccaagaagcagttttcagaagataatgaaacactgagacttgaaaaaaatgcaaanaaatcagagaagacctctccttctcttgtaatcactaacagttaacgtaaggccatgtctcttgccatcgttctctgcgactctgcatcccacagttgcttcggtcagttgcttcctcgccatgaacgctttctgtactccttgaggtcctccgtacttctgtaaagccgtt

SEQ ID NO: 966 - DNA, 331 bp, Arabidopsis thaliana
ttttttttttttttgtaaactcttgttatattgagaaaggaggatgttataagaaaaagaaacacacaaaaaaagtttaaagcacacaacctcacactaaaaaatacaaaatgtccatcaaatctctagagacggccacagtcgtacctagtatgacgaatttgatcacgaccaaacaaaagtaacaacaaagctataaacattagcctcagaacctttgatgacgtttgtagcgaacgtccggtcaaataagtctgcaccgaaagcccgagtaatctcatcctacgttcatccacatactcatcaatagcttcttcaatgtttttcatcg

SEQ ID NO: 967 - DNA, 331 bp, Arabidopsis thaliana
  misc_feature (1)...(331): n = A,T,C or G
ccgcggctgggcaggtccagcccggccagcaggccgagcagggtggtcttgccggaaccggaggcgccgacgatggccgcgctggtcccttcatggacggtcagggtgatgttgtccagtatgtggacttcaccctccgggccctgcacggatttgccgacctggtcgacggcgatggcaacggacgcgctnnnnggggacaggctgtcgatgaggagactccaatgcgcaagacgggatggagccggcgagccggcgcgatgatggtgctgctgctagggttcctgctgctgcccgggctggcctgtgccaaaggtccggccggcaccgt

SEQ ID NO: 968 - DNA, 331 bp, Arabidopsis thaliana
  misc_feature (1)...(331): n = A,T,C or G
gatgggaactaccaatggaacagactatggagcatacacatacaaggagctagaaagagagcaatattggccatctgagaatctcaagatatcaataacaggagctggaggtttcattgcatctcacattgctcgtcnnntgaagcacgaaggtcattacgtgattgcttctgactggaaaaagaatgaacacatgactgaagacatgttctgtgatgagttccatcttgttgatcttagggttatggagaattgtctcaaagttactgaaggagttgatcatgtttttaacttagctgctgatatgggtggtatgggttttatccagagt

SEQ ID NO: 969 - DNA, 331 bp, Arabidopsis thaliana
ccgcgcactccgagaagagaaagctccagatcctcacaaagaagctgtaaaaccaaggaacctggacgctggttcatttgggggatctcttcctcacccagcaagtacacggtttctgtcatatgaagaactcaaagaggcaactagcaattttgaatctgctagcattctaggagaaggtgggtttggcaaggtttacagaggcatcttagccgatggtactgctgtagcgattaagaagctcacaagtggtgggccacaaggtgataaagaattccaggtggagattgatatgcttagccgtcttcatcatcgtaatcttgtgaaactt

SEQ ID NO: 970 - DNA, 331 bp, Arabidopsis thaliana
cctttgggtggagatgagaatgtgactggagatctagatgcaacacctcaggtttttgataatcagtatttcaaagacttggtttcagggagagggtttcttaactctgatcagactttgtacacgaatctagtgacgagagagtatgtgaagatgtttagtgaggatcaagatgagttctttagggcttttgcagaaggcatggtgaagttgggtgatttgcaatctgggagacctggtgagattaggtttaattgtagagttgttaatagaaggcctattgatgtattgcttgtatcttgaattatcattagtaaagagaagaaatctt

SEQ ID NO: 971 - DNA, 331 bp, Arabidopsis thaliana
  misc_feature (1)...(331): n = A,T,C or G
tctactggatctgctgtgcgagaatctcggtttagagaagggttatttaaaaaaggtgttttacgnnngaaaagaccgacttttggaaccaaagtcagcaattatccaccttgtcctaatccggacctagtcaagggtctccgagcccacaccgacgccggcggcatcatcctcctcttccaagacgacaaagtcagtggacttcagcttcttaaagacggcgagtgggtcgatgttcctccggttaagcattcaatcgtcgttaatctcggcgatcaacttgaggtgataaccaatgggaagtacctcggccgcgaccggcgcgccggat

SEQ ID NO: 972 - DNA, 330 bp, Arabidopsis thaliana
aagcatctcttacatcacctctactcagcttctccctcttcatcgtcgtcccaacatcgccatcatcgatgtcagggatgaagagaggaattatgacgggcatatagctggatcgctacactatgcgagtggctcgtttgatgacaagatctcacatcttgttcaaaatgtcaaggacaaagacacacttgtcttccattgtgccttgagccaggttcgtggccctacttgtgcgagaaggctcgtgaattatcttgatgagaagaaagaagatactggaatcaaaaacatcatgatcttggaacgcggctttaacggttgggaagcttc

SEQ ID NO: 973 - DNA, 330 bp, Arabidopsis thaliana
tcgagcggccgcccgggcaggtacatctttatggggccaatatattaccagaaattgaaacacatggttctggacaagatgcatgcgcgagggagtggaccacgtgttatgatgacaagacagcctactgaagggaaatctaagaatggaggtttaagagtgggagaaatggaaagagattgtctaattgcttatggagccagcatgttgatctacgagcggctcatgatatctagtgatcctttcgaagttcaggtttgcagagcttgtggtttgttgggttattacaattacaagcttaagaaagcagtttgtacctcggccgcgacc

SEQ ID NO: 974 - DNA, 330 bp, Arabidopsis thaliana
aagcaatgaatctcatgaacaacattttgtgcaagatgagcatgggaaggagtttttcagaggagaatggtgagacagagaaactaaggggattagttaccgagtcgattggcttgatgaaaaagatgttcttggcagttttgttgcgcagacagcttcagaaacttggaatctcactattcaagaaggatatcatgggcgtttccaacaaatttgatgtgctgctagagaaagttcttgtggaacatagagagaaaccggagaaggatcaaggtacggttatgttggacgtgttgttggcagcttatggagacgaaaatgcagagtaca

SEQ ID NO: 975 - DNA, 330 bp, Arabidopsis thaliana
aagagtttcagaactaaccagaaataaccacagacgttcttgatcttgacaaacataaaatctcaaaacagtatcagttataaactctctcgactcctattctcttagcttcaagctatatgacttttaagaagaagcaacgaacgtggttaggatatttctcttgagagtgagttcatcagctttcactggacttatcgacttcccaagcacccgtccaagcctctccgtttctttgctagcatagtctgaacctttttctatgtagctctttgcgagtttcaagtaaagctttccatacctcgtggtggagcccttaagggtacttgc

SEQ ID NO: 976 - DNA, 330 bp, Arabidopsis thaliana
tcgagcggccgcccgggcaggtgctcttgatgttgctatcactgatgaaaacaagaaactcgagtttgtaccaaagcagtacacagcagaatggagaagatggctagagaacatacgtgactggtgtatttcaagacagctttggtggggacacagaataccagcatggtatgccactctagaggaggatcagctcaaggaggttggtgcatacagtgaccattgggttgttgctagaactgaggacgatgctcgagaagaggctgctcagaaatttttggggaagaagtttgaactcactcgagatcctgatgtacctcggccgcgacc

SEQ ID NO: 977 - DNA, 330 bp, Arabidopsis thaliana
ctctgttttaataagaatcatgaactgaagcatcctgcagtgaggttctgatacatacatataaagtattatatacacttagaggatttgtatctctgacatgtgaaagaacagagaaggaaacagagcaaaaaattgagttgaagaaacaagatcatattcaaaagaagtggcagagatgatataaccatgtaaatatatatattgttgcttttgcaacttcggagactactcgtggaggttcagaattatccgccaccaacatccgtcgtcgctttttctcctcccattcttcccataagatttgaatcagggttataacttaagaag

SEQ ID NO: 978 - DNA, 330 bp, Arabidopsis thaliana
ccacgcgtccggtacgaaagaataaaataataaatgtctttgacatccaattataccactgaaattttttttcatttttgaatggcagttccaaaaaaacgtacttctatctcgaaaaagcgtattcgtaaaaaaatttggaaaaggaagggatattggacatcgttgaaagctttttcattagggaaatcactttctacaggtaattcaaaaagtttttttgtacagcaaaataaataaaaaacactataataattagaattagcctaacttaaaaaccaatttgtttaaatacatctaaaaaaaataggaagcaaaaaaaaaaaaaaa

SEQ ID NO: 979 - DNA, 330 bp, Arabidopsis thaliana
ccacgcgtccgcggcgaacgaagcggcgattgcaccatgagagccaagtggaagaagaagcgtatgaggagactaaagaggaagcgccgaaagatgagacagcgatccaagtagtccattccataggacgtgtctcaaaatttctatcttatgtaatacctttctagtttcttgacttttaagcagcttcttgaatcagttttgaaccttttgtgttttttgcattttagtcttgaacaatcatctcagtctgtattttgaatttggttcactcctatatccactagatgcagttctggcaaaaaaaaaacaaaaaaaaaaaaggggggg

SEQ ID NO: 980 - DNA, 330 bp, Arabidopsis thaliana
gaacgatcggggaaattcgagctcggtacctcgagcggccgcccgggcaggtgaagagcttagcaacaatggcggcgaaaccgattgcgagtccgattccggtggcgctgtatccgactttatcggtgttcactcttgcgattggtctcgtcattaccgctatcttcttcatctatgaagctacatcatccaggaaaaaccgaagcgtcggaaaggagctcgctacttcagcagttgcatctgtcttcttgggttttggatcgttgtttttgctacttgctagtggtgtttatgtctgatccttcttcctcaatactattcccaactagt

SEQ ID NO: 981 - DNA, 330 bp, Arabidopsis thaliana
ttttttttttttttttttttttttttttttagcacaagtaaagacattcttattactgtatgtaaaccaaaataaaaccatacaaataataagtgtagatattgttagatgttcaaccacttcctgtaatatcaaagttctaactaataacgaaaaggtttttagagtttagtcttctccggccatggctacatcgtcttgatcagcatcaccatctccaaagtcatcatctccaccatatggtgccaccggaagagattcgtcttcatacaacggtgcatcaggaatctccatgtcctctgtcagtttcatcgtctccagattctcttc

SEQ ID NO: 982 - DNA, 330 bp, Arabidopsis thaliana
acgcgtacgtaagcttggatcctctagagcggccgcccttttttttttttttttagtattaggcaactcacttattcttaaagacacatagttaatatacatagtcaaaagtaccattaacaaaaacaaacctacattttcacccatttctttgataattattactcattgcacatactcatgatacatctcatccatttattatgtattgacccctctctaatccgacttgatttctggagttctgatagattccgggtacagagtactacgtacaccaggaatgtccatgatcctcttgttgagtgcagtatcctcggacataccagt

SEQ ID NO: 983 - DNA, 330 bp, Arabidopsis thaliana
acatcacatatgactgcattcataaaacctttataggtaggttcatgtacaatcacattcaattaaatgatcttttgtcttacttttcttgaacatataaagatcttagatctccaaagaatcttagaacctctattcatcatgattaaatgggtgggtacaaagagagacttagagatcaaacgttggaatttcagaagaccaaccatgtgaggcctgatacaacatcctaggcaataagtgtctgtagggatcactctctcttttcacttttaaatagtcaatgcattgttctacctcagatttaacttgcaagtagagctcttgtgc

SEQ ID NO: 984 - DNA, 330 bp, Arabidopsis thaliana
atgatcaaaaagaagataattaagtagattctcatgaacgccgatttgttcaccgattgagccaaaatcgcggcggtccacgcagaaatagcgcttttttcgacgcctagtcgaccgattagtccgatgtttagaagcgtttgttttagagaataattatgccttcatttttgtcaagtttgtttggtttgggcattcaagcctcttttagaataggtttggttcttcctcgagtagtagcatctacagagagacagatttcctctacggttttaaaaagagcttctgaaagtgtctctttttcattcgctccgtacataaatgggtttg

SEQ ID NO: 985 - DNA, 330 bp, Arabidopsis thaliana
  misc_feature (1)...(330): n = A,T,C or G
tccgatctcctttccttgtacatctagatccaagcggtatcgatggctcgacgtggattattgatttcgttcttcgctatcttctccgtcctgcttcaatcttccacttctctgatcagttcttctagcgtcttcgtcaatccttccaaagtcaagcaggtttcatcgaaacccagggcgtttgtgtatgaagggtttctcacggaattggaatgtgatcatatggtctcccttgcaaaagcgagcctgaagagatctgctgnngctgataatgatagtggagagagcaaattcagcgaggttcgaaccagctctggcacctttatctcc

SEQ ID NO: 986 - DNA, 330 bp, Arabidopsis thaliana
tcgttccttatctcttattcgagaacacaatgtctgtcaccaagttcaatgcgatggtgtccggattattccaattgggtagctcttacgagtggattgtcacaaagaaagctggaagatcatcagagtcagatcttttatctatcaccgagaaagagacaccaaccaagaaaagtcaattgcttaggggagtttccgacagcgaacttttggagctgagccaacttgaagaacagaaacaagcggtttcaaagaaacctgtcaagaaaaccaacaagatataccacaaagagctcgcattggcctttcttttgctcactgcagcgctta

SEQ ID NO: 987 - DNA, 330 bp, Arabidopsis thaliana
  misc_feature (1)...(330): n = A,T,C or G
ggaatgacaggtgatggagtaaatgatgcgcctgctcttaaaaaggctgatattggcattgcagttgctgatgcaactgatgcagcacgtagtgcttcagatatcgttcttactgaacctggtcttagtgttatcatcagcgctgtcttaaccagccgtnctatcttccagagaatgaaaaattatacaatctatgcggtttccatcactatccgtattgttcttggcttcatgctgctagctcttatatggaagtttgactttccacccttcatggttcttatcattgccattctgaatgatggcacaattatgacaatatcaaaagac

SEQ ID NO: 988 - DNA, 330 bp, Arabidopsis thaliana
  misc_feature (1)...(330): n = A,T,C or G
ttggtgaaactgcttgaggacataatggatggaagcagaattcttgtcttcctcgatacaaaaaagggctgtgaccaaatcactcgtcagcttcgcatggatggttggcctgctttgtcaatacatggagataaaagtcaagcggaaagagattgggttctctcggagtttagatcaggcaaaagccctataatgactgctacagacgttgcagctcgtggattagacgtgaaagatgtgaagtatgtgataaactatgactnnnctggatcactggaggattatgttcacaggattggacgaacaggtagagccggggctaaaggaaca

SEQ ID NO: 989 - DNA, 329 bp, Arabidopsis thaliana
tcgagcggccgcccgggcaggtccgggcaggtactcaaacgtgacaaaagctacaccatcgtttccttgaccaacaagtatctttctaacaccatcaaaaacaccatcatcccaagaagctcctccattaccacctcttgcttgtagcttcttggtagtagatggagtagtcgaagttgtcgatggagcgaaataggcaccaagagcataaagaacatcactagctttcccatggaatccggcaagttttcctccgttaccatctttaagttcgaatttcttctcagtcaccattccaaaaggcggtgaggttgtacctcggccgcgac

SEQ ID NO: 990 - DNA, 329 bp, Arabidopsis thaliana
tcgagcggccgcccgggcaggtaaaagtgtgacataaattgttgtcctcaacaaacaccataaaaatcacaaatttcgttctgggctctttatttttttcaatcaccacattttcacttgttaaaattttgttactttgctctatctgaaaccaaagctgccatctttctccttttgggttttgattagatctccgattttgggtttctatatattatgcgagctcacttttgttcgttctgattatctgacaatgatattctccaagcttggttcttccctcgctcgatcctcacgttctaagggatttgtgtacctcggccgcgacc

SEQ ID NO: 991 - DNA, 329 bp, Arabidopsis thaliana
  misc_feature (1)...(329): n = A,T,C or G
ccacgcgtccgggctgttggtggcggaagcgatgtggaggttggatttgcgaagcttcaaggtgaggatttcgagtactatatgcagtcttactccattatactcggccggaattctaagaaagccaccgtcgacgttgatctctcatccctcggcggtgggatgaacatctcgcgcaaccacgctcggatcttctatgacttcactagacgacgcttctctctcgaggtccttggcaaaaatggctgcctcgttgaaggnnttcttcatctccctgggaatcctaacgtcaagctcgattcacaagaccttttgcagatcggagacaa

SEQ ID NO: 992 - DNA, 329 bp, Arabidopsis thaliana
  misc_feature (1)...(329): n = A,T,C or G
aacctctcttacgacgctccttcctcaatctctctcgatcgtcggagattctttcttcaagagtcatcttcttcttcttctccttctccctaaaccctaatttatcgcgtttggatcgaatcagctnncaattcttgttttggttttcacggccagggccatgtctgccgtatattgcggaaccaagagatcttacttcgacgataattcttctccgccctcttctaagaggttccgatgtttttcgccttccaattctccaatctggtcctctcctccttcctcatcgctcgatcagcttcactctgcgtttcctcatattgaactca

SEQ ID NO: 993 - DNA, 329 bp, Arabidopsis thaliana
gtggttgcggcgtatattaagaatcctacagcttcacttacgcttctttattctcatggtaacgccgcggatcttggtcagatgttcgagcttttctccgagcttagccttcatcttcgtgttaacttaattgggtatgattattcgggatatgggagatcttcagggaagcctagtgagcagaatacgtatagcgatatagaagcagtgtatagatgcttggaagagaagtatggtgtgaaggaacaagatgttatcttatatggacaatctgtaggaagcggcccgactttagaattggcttctcggttacctaacctacgagccgt

SEQ ID NO: 994 - DNA, 329 bp, Arabidopsis thaliana
tgataaagaaaaccgagactgtaccggtttatcttcagacccggttgtttgtccggtttggtaaaattagaacctaacctttttatccagaactggagactttggaagaactgtagaagtgttgttctcttcgtatcgtcctcaatcctcatggagactattatcaggctgttttgagcaaacgctgtgataaagaggctttctttcttgctagcaagtacacacgagtgacatggcggcatcaacttcaacccgattccttgttctgctcaaagatttttctgccttcagaaagatatcatggacttgtgctgcaactaattttcacc

SEQ ID NO: 995 - DNA, 329 bp, Arabidopsis thaliana
cccttttttttttttttttttttttgattgggataaaccatctttcctaacaaaatatgaactcataccatatagaattcactcttgtttgatacaaaaacatcattaaaaaagcaagtgcaaaaattctgagtagagaatgataaaaaaatggaaacaactcaataaccacccttgagatcgttgacaacatcgtaaggaatgggagtgacagtctccaatgtcataccttcgaccatgaaacccggtttaggacctttaggctgtctcttggtgctgatagtctctcctctggctttagcatcagccttaagcacacggacgcgtgg

SEQ ID NO: 996 - DNA, 329 bp, Arabidopsis thaliana
ttctggcgctcgagcggccgcccgggcaggtggctgctgtcgctagggaccgagcatgggctgaaagactgattgagcttcaacagctggaagaagagaagaagaaatcaatgtcttcttgagatcaaacatagaaataatcctaaatgacaatctcttttcttgtcttgagttagagaattactcttctttgttgtgtttggcatgttctcttgagagttaactcgctatgttgtctgaagaactgagagttacttgacgtttgtgttctttatatccagtcatgtgtttcttgtttcatgaaaaaaaaaaaaaaaaaaaaaaaaaaa

SEQ ID NO: 997 - DNA, 329 bp, Arabidopsis thaliana
gcggccgccgtcagctgaaaaacctgacacacttggagatgtctctgacgtgtctgattcagtagatagttcagctgaaatacttcagcttgattcagaagatagagagagtagtcctgttcattgggaaatggatgcctcagaggttcatcctccttctgcaggagacactagcagaggaagaggcaattctttttctatacctaatggagttgcagaaagaaagggtctgtccacaatggatgatagttcttcaacctgttctaatgactcgattcaatcaggggtagccaatgggtcatacaaagggaatgtattaaattgccaaa

SEQ ID NO: 998 - DNA, 329 bp, Arabidopsis thaliana
gcggccgccattttcaggtttcagcaaaaccactctgtttttctttgtcttttacgtcacagtatttgaaaccctctttgtgaaacagaggttcctacgctgtacactgtctatgaacggatgtgaggctgaccacaaagcaccacttggcacggtagaaacaaggactctatcaacggtgccatctccggcagccgcgacggagaggctgataaccgccgtctctgacctcaaatctcaaccgcctccattctcctccggcattgtccgattacaggtaccaattgagcagaaaattggagcaatcgattggcttcatgcacagaacg

SEQ ID NO: 999 - DNA, 329 bp, Arabidopsis thaliana
tcgaaatggctaaaactcgtgggggggaagagaagagatccggttcgtcgatcacggagactgagtcaagcatccgccgaatcaaatcctactgaagctgaaccaattttaattccttctgtcgacgaggctaatcgaaagaaaagaaaaaggaagaaggtagttgaagtagatattgaggaagatcgtgagcctgtgagtggcgatgattgtgaggttgttggtgacgaagattgcgaagaggtttgctatgcagacaagagaatcgggaataacgaagaacatggtggagaggaacaatgggacattgacattgtttctgttcagca

What is claimed is:

1. A nucleic acid comprising a sequence capable of hybridizing under stringent conditions to a sequence set forth in SEQ ID NO:1 to 999, or a fragment thereof.

2. A vector comprising the nucleic acid of claim 1.

3. The vector of claim 2, wherein said vector comprises regulatory elements for expression, operably linked to said sequence.

4. A polypeptide encoded by the nucleic acid of claim 1.

5. A nucleic acid comprising: an ATG start codon; an optional intervening sequence; a coding sequence capable of hybridizing under stringent conditions as set forth in SEQ ID NO:1 to 999; and an optional terminal sequence, wherein at least one of said optional sequences is present, and wherein:
ATG is a start codon;
said intervening sequence comprises one or more codons in-frame with said coding sequence, and is free of in-frame stop codons; and
said terminal sequence comprises one or more codons in-frame with said coding sequence, and a terminal stop codon.

6. The nucleic acid of claim 5, wherein said nucleic acid is expressed in Arabidopsis thaliana.

7. The nucleic acid of claim 5, wherein said nucleic acid encodes a plant protein.

8. The nucleic acid of claim 7, wherein said plant is a dicot.

9. The nucleic acid of claim 8, wherein said dicot is Arabidopsis thaliana.

10. The nucleic acid of claim 7, wherein said plant protein is a naturally occurring plant protein.

11. The nucleic acid of claim 7, wherein said plant protein is a genetically modified plant protein.

12. The nucleic acid of claim 5, wherein said nucleic acid encodes a fusion protein comprising an Arabidopsis thaliana protein and a fusion partner.

13. The nucleic acid of claim 5, wherein said nucleic acid encodes a fusion protein comprising a plant protein and a fusion partner.

14. A transgenic plant comprising an exogenous nucleic acid, wherein said nucleic acid comprises transcription regulatory sequences operably linked to a sequence capable of hybridizing under stringent conditions to a sequence set forth in SEQ ID NO:1 to 999 or a fragment thereof, wherein said sequence is expressed in cells of said plant.

15. The transgenic plant of claim 14, wherein said plant is regenerated from transformed embryogenic tissue.

16. The transgenic plant of claim 14, wherein said plant is a progeny of one or more subsequent generations from transformed embryogenic tissue.

17. The transgenic plant of claim 14, wherein said sequence capable of hybridizing under stringent conditions to a sequence set forth in SEQ ID NO:1 to 999 encodes a plant protein.

18. The transgenic plant of claim 14, wherein said plant protein is a naturally occurring plant protein.

19. The transgenic plant of claim 14, wherein said plant protein is a genetically altered plant protein.

20. The transgenic plant of claim 14, wherein said sequence expressed in cells of said plant is an anti-sense sequence.

21. The transgenic plant of claim 14, wherein said sequence expressed in cells of said plant is a sense sequence.

22. The transgenic plant of claim 14, wherein said sequence is selectively expressed in specific tissues of said plant.

23. The transgenic plant of claim 14, wherein said specific tissue is selected from the group consisting of leaves, stems, roots, flowers, tissues, epicotyls, meristems, hypocotyls, cotyledons, pollen, ovaries, cells, and protoplasts.

24. A genetically modified cell, comprising an exogenous nucleic acid, wherein said nucleic acid comprises transcription regulatory sequences operably linked to a sequence capable of hybridizing under stringent conditions to a sequence set forth in SEQ ID NO:1 to 999, wherein said sequence is expressed in cells of said plant.

25. A method of screening a candidate agent for its biological effect; the method comprising:
combining said candidate agent with one of:
a genetically modified cell according to claim 24, a transgenic plant according to claim 14, or a polypeptide according to claim 4; and
determining the effect of said candidate agent on said plant, cell or polypeptide.

26. A nucleic acid array comprising at least one nucleic acid as set forth in SEQ ID NO:1-999 stably bound to a solid support.

27. An array comprising at least one polypeptide encoded by a nucleic acid as set forth in SEQ ID NO:1-999, stably bound to a solid support.
